United States Patent Application Publication US 2025/0059576 A1 - sequence listing, part 3

SEQ ID NO: 43792 - DNA, 16 bp, synthetic construct
  misc_feature 1..16: note = synthetic [barcode part1]
  source 1..16: mol_type = other DNA
actctagtgactggtg

SEQ ID NO: 43793 - DNA, 16 bp, synthetic construct
  misc_feature 1..16: note = synthetic [barcode part1]
  source 1..16: mol_type = other DNA
acttaaggtggcaagt

SEQ ID NO: 43794 - DNA, 16 bp, synthetic construct
  misc_feature 1..16: note = synthetic [barcode part1]
  source 1..16: mol_type = other DNA
gtgtgtggactaacct

SEQ ID NO: 43795 - DNA, 16 bp, synthetic construct
  misc_feature 1..16: note = synthetic [barcode part1]
  source 1..16: mol_type = other DNA
agtctaattccgcact

SEQ ID NO: 43796 - DNA, 16 bp, synthetic construct
  misc_feature 1..16: note = synthetic [barcode part1]
  source 1..16: mol_type = other DNA
gcgcaggagattgttg

SEQ ID NO: 43797 - DNA, 16 bp, synthetic construct
  misc_feature 1..16: note = synthetic [barcode part1]
  source 1..16: mol_type = other DNA
gtcttcggtaagaacc

SEQ ID NO: 43798 - DNA, 16 bp, synthetic construct
  misc_feature 1..16: note = synthetic [barcode part1]
  source 1..16: mol_type = other DNA
acgagtgtgttgcgag

SEQ ID NO: 43799 - DNA, 16 bp, synthetic construct
  misc_feature 1..16: note = synthetic [barcode part1]
  source 1..16: mol_type = other DNA
caaggttctccagaac

SEQ ID NO: 43800 - DNA, 16 bp, synthetic construct
  misc_feature 1..16: note = synthetic [barcode part1]
  source 1..16: mol_type = other DNA
ccgtctatactcgttc

SEQ ID NO: 43801 - DNA, 16 bp, synthetic construct
  misc_feature 1..16: note = synthetic [barcode part1]
  source 1..16: mol_type = other DNA
taccttactcgaacac

SEQ ID NO: 43802 - DNA, 16 bp, synthetic construct
  misc_feature 1..16: note = synthetic [barcode part1]
  source 1..16: mol_type = other DNA
tacgacttcttcaacg

SEQ ID NO: 43803 - DNA, 16 bp, synthetic construct
  misc_feature 1..16: note = synthetic [barcode part1]
  source 1..16: mol_type = other DNA
gtctcgtgcgattacc

SEQ ID NO: 43804 - DNA, 16 bp, synthetic construct
  misc_feature 1..16: note = synthetic [barcode part1]
  source 1..16: mol_type = other DNA
tgcgtgaggtacactt

SEQ ID NO: 43805 - DNA, 16 bp, synthetic construct
  misc_feature 1..16: note = synthetic [barcode part1]
  source 1..16: mol_type = other DNA
ttgccacttactccac

SEQ ID NO: 43806 - DNA, 16 bp, synthetic construct
  misc_feature 1..16: note = synthetic [barcode part1]
  source 1..16: mol_type = other DNA
cctaattactgtgcac

SEQ ID NO: 43807 - DNA, 16 bp, synthetic construct
  misc_feature 1..16: note = synthetic [barcode part1]
  source 1..16: mol_type = other DNA
tgtagacgaactcacc

SEQ ID NO: 43808 - DNA, 16 bp, synthetic construct
  misc_feature 1..16: note = synthetic [barcode part1]
  source 1..16: mol_type = other DNA
accgcggtctagaatt

SEQ ID NO: 43809 - DNA, 16 bp, synthetic construct
  misc_feature 1..16: note = synthetic [barcode part1]
  source 1..16: mol_type = other DNA
cgttgttgcctaagtt

SEQ ID NO: 43810 - DNA, 16 bp, synthetic construct
  misc_feature 1..16: note = synthetic [barcode part1]
  source 1..16: mol_type = other DNA
caaggtgtaaggaacg

SEQ ID NO: 43811 - DNA, 16 bp, synthetic construct
  misc_feature 1..16: note = synthetic [barcode part1]
  source 1..16: mol_type = other DNA
ttgtcgttgtcgtcct

SEQ ID NO: 43812 - DNA, 16 bp, synthetic construct
  misc_feature 1..16: note = synthetic [barcode part1]
  source 1..16: mol_type = other DNA
attcggacttgaacgc

SEQ ID NO: 43813 - DNA, 16 bp, synthetic construct
  misc_feature 1..16: note = synthetic [barcode part1]
  source 1..16: mol_type = other DNA
gtattcgtcacagacg

SEQ ID NO: 43814 - DNA, 16 bp, synthetic construct
  misc_feature 1..16: note = synthetic [barcode part1]
  source 1..16: mol_type = other DNA
taacggtgtattctcc

SEQ ID NO: 43815 - DNA, 16 bp, synthetic construct
  misc_feature 1..16: note = synthetic [barcode part1]
  source 1..16: mol_type = other DNA
gaataccactcgtgac

SEQ ID NO: 43816 - DNA, 16 bp, synthetic construct
  misc_feature 1..16: note = synthetic [barcode part1]
  source 1..16: mol_type = other DNA
ttaggacgacgttacc

SEQ ID NO: 43817 - DNA, 16 bp, synthetic construct
  misc_feature 1..16: note = synthetic [barcode part1]
  source 1..16: mol_type = other DNA
aacttgccactgcctg

SEQ ID NO: 43818 - DNA, 16 bp, synthetic construct
  misc_feature 1..16: note = synthetic [barcode part1]
  source 1..16: mol_type = other DNA
cgattaggagaaggac

SEQ ID NO: 43819 - DNA, 16 bp, synthetic construct
  misc_feature 1..16: note = synthetic [barcode part1]
  source 1..16: mol_type = other DNA
gatcagttacgtgcac

SEQ ID NO: 43820 - DNA, 16 bp, synthetic construct
  misc_feature 1..16: note = synthetic [barcode part1]
  source 1..16: mol_type = other DNA
tcagatactacctcgt

SEQ ID NO: 43821 - DNA, 16 bp, synthetic construct
  misc_feature 1..16: note = synthetic [barcode part1]
  source 1..16: mol_type = other DNA
agtcgttgttcgacag

SEQ ID NO: 43822 - DNA, 16 bp, synthetic construct
  misc_feature 1..16: note = synthetic [barcode part1]
  source 1..16: mol_type = other DNA
tcagaacgccttagac

SEQ ID NO: 43823 - DNA, 16 bp, synthetic construct
  misc_feature 1..16: note = synthetic [barcode part1]
  source 1..16: mol_type = other DNA
cgttacctcgttactc

SEQ ID NO: 43824 - DNA, 16 bp, synthetic construct
  misc_feature 1..16: note = synthetic [barcode part1]
  source 1..16: mol_type = other DNA
tggtgcaggttacgtt

SEQ ID NO: 43825 - DNA, 16 bp, synthetic construct
  misc_feature 1..16: note = synthetic [barcode part1]
  source 1..16: mol_type = other DNA
caggtgtagtctgtgt

SEQ ID NO: 43826 - DNA, 16 bp, synthetic construct
  misc_feature 1..16: note = synthetic [barcode part1]
  source 1..16: mol_type = other DNA
agacaggatcctaggc

SEQ ID NO: 43827 - DNA, 16 bp, synthetic construct
  misc_feature 1..16: note = synthetic [barcode part1]
  source 1..16: mol_type = other DNA
gagttctgtgtcacag

SEQ ID NO: 43828 - DNA, 16 bp, synthetic construct
  misc_feature 1..16: note = synthetic [barcode part1]
  source 1..16: mol_type = other DNA
gagacagttcagacgc

SEQ ID NO: 43829 - DNA, 16 bp, synthetic construct
  misc_feature 1..16: note = synthetic [barcode part1]
  source 1..16: mol_type = other DNA
caccgtccgaattcgt

SEQ ID NO: 43830 - DNA, 16 bp, synthetic construct
  misc_feature 1..16: note = synthetic [barcode part1]
  source 1..16: mol_type = other DNA
tgcagaggattcggtg

SEQ ID NO: 43831 - DNA, 16 bp, synthetic construct
  misc_feature 1..16: note = synthetic [barcode part1]
  source 1..16: mol_type = other DNA
gttgttgacgtcctcg

SEQ ID NO: 43832 - DNA, 16 bp, synthetic construct
  misc_feature 1..16: note = synthetic [barcode part1]
  source 1..16: mol_type = other DNA
gcgtgcgcaattgatt

SEQ ID NO: 43833 - DNA, 16 bp, synthetic construct
  misc_feature 1..16: note = synthetic [barcode part1]
  source 1..16: mol_type = other DNA
acgtgacagaattggt

SEQ ID NO: 43834 - DNA, 16 bp, synthetic construct
  misc_feature 1..16: note = synthetic [barcode part1]
  source 1..16: mol_type = other DNA
tctagttcgcaatcac

SEQ ID NO: 43835 - DNA, 16 bp, synthetic construct
  misc_feature 1..16: note = synthetic [barcode part1]
  source 1..16: mol_type = other DNA
tcgtgaacttggcctc

SEQ ID NO: 43836 - DNA, 16 bp, synthetic construct
  misc_feature 1..16: note = synthetic [barcode part1]
  source 1..16: mol_type = other DNA
cgtatacgcgtatacg

SEQ ID NO: 43837 - DNA, 16 bp, synthetic construct
  misc_feature 1..16: note = synthetic [barcode part1]
  source 1..16: mol_type = other DNA
acaagtcggttacgtc

SEQ ID NO: 43838 - DNA, 16 bp, synthetic construct
  misc_feature 1..16: note = synthetic [barcode part1]
  source 1..16: mol_type = other DNA
gtggcacgattctaac

SEQ ID NO: 43839 - DNA, 16 bp, synthetic construct
  misc_feature 1..16: note = synthetic [barcode part1]
  source 1..16: mol_type = other DNA
gacgagacacggattc

SEQ ID NO: 43840 - DNA, 16 bp, synthetic construct
  misc_feature 1..16: note = synthetic [barcode part1]
  source 1..16: mol_type = other DNA
gtgagtgtctaaggcg

SEQ ID NO: 43841 - DNA, 16 bp, synthetic construct
  misc_feature 1..16: note = synthetic [barcode part1]
  source 1..16: mol_type = other DNA
cgagtacgttgcctct

SEQ ID NO: 43842 - DNA, 16 bp, synthetic construct
  misc_feature 1..16: note = synthetic [barcode part1]
  source 1..16: mol_type = other DNA
aacctaacgtgagagt

SEQ ID NO: 43843 - DNA, 16 bp, synthetic construct
  misc_feature 1..16: note = synthetic [barcode part1]
  source 1..16: mol_type = other DNA
cacgtagatcttctgt

SEQ ID NO: 43844 - DNA, 16 bp, synthetic construct
  misc_feature 1..16: note = synthetic [barcode part1]
  source 1..16: mol_type = other DNA
ccgtcgtgttctatct

SEQ ID NO: 43845 - DNA, 16 bp, synthetic construct
  misc_feature 1..16: note = synthetic [barcode part1]
  source 1..16: mol_type = other DNA
gttgtaactgtccact

SEQ ID NO: 43846 - DNA, 16 bp, synthetic construct
  misc_feature 1..16: note = synthetic [barcode part1]
  source 1..16: mol_type = other DNA
aagtgattgcgaatcg

SEQ ID NO: 43847 - DNA, 16 bp, synthetic construct
  misc_feature 1..16: note = synthetic [barcode part1]
  source 1..16: mol_type = other DNA
tggacagttgtggcag

SEQ ID NO: 43848 - DNA, 16 bp, synthetic construct
  misc_feature 1..16: note = synthetic [barcode part1]
  source 1..16: mol_type = other DNA
agtgttgcgtatacgc

SEQ ID NO: 43849 - DNA, 16 bp, synthetic construct
  misc_feature 1..16: note = synthetic [barcode part1]
  source 1..16: mol_type = other DNA
gacgagattaggtgcc

SEQ ID NO: 43850 - DNA, 16 bp, synthetic construct
  misc_feature 1..16: note = synthetic [barcode part1]
  source 1..16: mol_type = other DNA
agtggacaccttggag

SEQ ID NO: 43851 - DNA, 16 bp, synthetic construct
  misc_feature 1..16: note = synthetic [barcode part1]
  source 1..16: mol_type = other DNA
tataggtagacgacgt

SEQ ID NO: 43852 - DNA, 16 bp, synthetic construct
  misc_feature 1..16: note = synthetic [barcode part1]
  source 1..16: mol_type = other DNA
cgaaccagtcaagtct

SEQ ID NO: 43853 - DNA, 16 bp, synthetic construct
  misc_feature 1..16: note = synthetic [barcode part1]
  source 1..16: mol_type = other DNA
tcggcctcaccttatt

SEQ ID NO: 43854 - DNA, 16 bp, synthetic construct
  misc_feature 1..16: note = synthetic [barcode part1]
  source 1..16: mol_type = other DNA
actaacctcaggatcg

SEQ ID NO: 43855 - DNA, 16 bp, synthetic construct
  misc_feature 1..16: note = synthetic [barcode part1]
  source 1..16: mol_type = other DNA
taccacagttggtcag

SEQ ID NO: 43856 - DNA, 16 bp, synthetic construct
  misc_feature 1..16: note = synthetic [barcode part1]
  source 1..16: mol_type = other DNA
cagacactcgatacgt

SEQ ID NO: 43857 - DNA, 16 bp, synthetic construct
  misc_feature 1..16: note = synthetic [barcode part1]
  source 1..16: mol_type = other DNA
ataactagaccaaggc

SEQ ID NO: 43858 - DNA, 16 bp, synthetic construct
  misc_feature 1..16: note = synthetic [barcode part1]
  source 1..16: mol_type = other DNA
ccgaacgataatagac

SEQ ID NO: 43859 - DNA, 16 bp, synthetic construct
  misc_feature 1..16: note = synthetic [barcode part1]
  source 1..16: mol_type = other DNA
acaatcggttgtacgc

SEQ ID NO: 43860 - DNA, 16 bp, synthetic construct
  misc_feature 1..16: note = synthetic [barcode part1]
  source 1..16: mol_type = other DNA
agagagtgcaactact

SEQ ID NO: 43861 - DNA, 16 bp, synthetic construct
  misc_feature 1..16: note = synthetic [barcode part1]
  source 1..16: mol_type = other DNA
ccagttcgcgattgtc

SEQ ID NO: 43862 - DNA, 16 bp, synthetic construct
  misc_feature 1..16: note = synthetic [barcode part1]
  source 1..16: mol_type = other DNA
aatccgtcgtcactcg

SEQ ID NO: 43863 - DNA, 16 bp, synthetic construct
  misc_feature 1..16: note = synthetic [barcode part1]
  source 1..16: mol_type = other DNA
ttggacggttctatct

SEQ ID NO: 43864 - DNA, 16 bp, synthetic construct
  misc_feature 1..16: note = synthetic [barcode part1]
  source 1..16: mol_type = other DNA
tgcacagttactacct

SEQ ID NO: 43865 - DNA, 16 bp, synthetic construct
  misc_feature 1..16: note = synthetic [barcode part1]
  source 1..16: mol_type = other DNA
tacactgacaccagtg

SEQ ID NO: 43866 - DNA, 16 bp, synthetic construct
  misc_feature 1..16: note = synthetic [barcode part1]
  source 1..16: mol_type = other DNA
cagtaacaggagtatc

SEQ ID NO: 43867 - DNA, 16 bp, synthetic construct
  misc_feature 1..16: note = synthetic [barcode part1]
  source 1..16: mol_type = other DNA
tctccacagtgtagag

SEQ ID NO: 43868 - DNA, 16 bp, synthetic construct
  misc_feature 1..16: note = synthetic [barcode part1]
  source 1..16: mol_type = other DNA
agaccttaggaaggag

SEQ ID NO: 43869 - DNA, 16 bp, synthetic construct
  misc_feature 1..16: note = synthetic [barcode part1]
  source 1..16: mol_type = other DNA
gataatcgagacacgt

SEQ ID NO: 43870 - DNA, 16 bp, synthetic construct
  misc_feature 1..16: note = synthetic [barcode part1]
  source 1..16: mol_type = other DNA
agtcctcctagacacc

SEQ ID NO: 43871 - DNA, 16 bp, synthetic construct
  misc_feature 1..16: note = synthetic [barcode part1]
  source 1..16: mol_type = other DNA
gtcgcacaaggactag

SEQ ID NO: 43872 - DNA, 16 bp, synthetic construct
  misc_feature 1..16: note = synthetic [barcode part1]
  source 1..16: mol_type = other DNA
cgagatccaactggtt

SEQ ID NO: 43873 - DNA, 16 bp, synthetic construct
  misc_feature 1..16: note = synthetic [barcode part1]
  source 1..16: mol_type = other DNA
cacacctcggattacc

SEQ ID NO: 43874 - DNA, 16 bp, synthetic construct
  misc_feature 1..16: note = synthetic [barcode part1]
  source 1..16: mol_type = other DNA
caagtgcgccactctt

SEQ ID NO: 43875 - DNA, 16 bp, synthetic construct
  misc_feature 1..16: note = synthetic [barcode part1]
  source 1..16: mol_type = other DNA
aggattccaagtagac

SEQ ID NO: 43876 - DNA, 16 bp, synthetic construct
  misc_feature 1..16: note = synthetic [barcode part1]
  source 1..16: mol_type = other DNA
tggttctaccacgcgt

SEQ ID NO: 43877 - DNA, 16 bp, synthetic construct
  misc_feature 1..16: note = synthetic [barcode part1]
  source 1..16: mol_type = other DNA
gtgagtcacgtaacct

SEQ ID NO: 43878 - DNA, 16 bp, synthetic construct
  misc_feature 1..16: note = synthetic [barcode part1]
  source 1..16: mol_type = other DNA
tactctgttgcggatt

SEQ ID NO: 43879 - DNA, 16 bp, synthetic construct
  misc_feature 1..16: note = synthetic [barcode part1]
  source 1..16: mol_type = other DNA
acctacaggaataacg

SEQ ID NO: 43880 - DNA, 16 bp, synthetic construct
  misc_feature 1..16: note = synthetic [barcode part1]
  source 1..16: mol_type = other DNA
gtaattgccgattcct

SEQ ID NO: 43881 - DNA, 16 bp, synthetic construct
  misc_feature 1..16: note = synthetic [barcode part1]
  source 1..16: mol_type = other DNA
cagtctctcctgattc

SEQ ID NO: 43882 - DNA, 16 bp, synthetic construct
  misc_feature 1..16: note = synthetic [barcode part1]
  source 1..16: mol_type = other DNA
cctgtaataccgtccg

SEQ ID NO: 43883 - DNA, 16 bp, synthetic construct
  misc_feature 1..16: note = synthetic [barcode part1]
  source 1..16: mol_type = other DNA
tactgaggacaacctc

SEQ ID NO: 43884 - DNA, 16 bp, synthetic construct
  misc_feature 1..16: note = synthetic [barcode part1]
  source 1..16: mol_type = other DNA
cgtgaatagtaagacc

SEQ ID NO: 43885 - DNA, 16 bp, synthetic construct
  misc_feature 1..16: note = synthetic [barcode part1]
  source 1..16: mol_type = other DNA
aggagtcttggagaag

SEQ ID NO: 43886 - DNA, 16 bp, synthetic construct
  misc_feature 1..16: note = synthetic [barcode part1]
  source 1..16: mol_type = other DNA
ttgtagatcgtcgtct

SEQ ID NO: 43887 - DNA, 16 bp, synthetic construct
  misc_feature 1..16: note = synthetic [barcode part1]
  source 1..16: mol_type = other DNA
tactcgttccaagact

SEQ ID NO: 43888 - DNA, 16 bp, synthetic construct
  misc_feature 1..16: note = synthetic [barcode part1]
  source 1..16: mol_type = other DNA
tacgaacagactcgtc

SEQ ID NO: 43889 - DNA, 16 bp, synthetic construct
  misc_feature 1..16: note = synthetic [barcode part1]
  source 1..16: mol_type = other DNA
ccggtctcgttaacgt

SEQ ID NO: 43890 - DNA, 16 bp, synthetic construct
  misc_feature 1..16: note = synthetic [barcode part1]
  source 1..16: mol_type = other DNA
tgagtctacggcagag

SEQ ID NO: 43891 - DNA, 16 bp, synthetic construct
  misc_feature 1..16: note = synthetic [barcode part1]
  source 1..16: mol_type = other DNA
tgttgttgtagttgcc

SEQ ID NO: 43892 - DNA, 16 bp, synthetic construct
  misc_feature 1..16: note = synthetic [barcode part1]
  source 1..16: mol_type = other DNA
tctgaaggagatcctc

SEQ ID NO: 43893 - DNA, 16 bp, synthetic construct
  misc_feature 1..16: note = synthetic [barcode part1]
  source 1..16: mol_type = other DNA
aatacacacgtgccgt

SEQ ID NO: 43894 - DNA, 16 bp, synthetic construct
  misc_feature 1..16: note = synthetic [barcode part1]
  source 1..16: mol_type = other DNA
tagttggatcgcgatc

SEQ ID NO: 43895 - DNA, 16 bp, synthetic construct
  misc_feature 1..16: note = synthetic [barcode part1]
  source 1..16: mol_type = other DNA
tagacctcaggtgttg

SEQ ID NO: 43896 - DNA, 16 bp, synthetic construct
  misc_feature 1..16: note = synthetic [barcode part1]
  source 1..16: mol_type = other DNA
taagacctcctgagac

SEQ ID NO: 43897 - DNA, 16 bp, synthetic construct
  misc_feature 1..16: note = synthetic [barcode part1]
  source 1..16: mol_type = other DNA
gcaagtgccacaacag

SEQ ID NO: 43898 - DNA, 16 bp, synthetic construct
  misc_feature 1..16: note = synthetic [barcode part1]
  source 1..16: mol_type = other DNA
agacgaccgtgaatcg

SEQ ID NO: 43899 - DNA, 16 bp, synthetic construct
  misc_feature 1..16: note = synthetic [barcode part1]
  source 1..16: mol_type = other DNA
tccttcgtattccgtg

SEQ ID NO: 43900 - DNA, 16 bp, synthetic construct
  misc_feature 1..16: note = synthetic [barcode part1]
  source 1..16: mol_type = other DNA
gcggattcaattctct

SEQ ID NO: 43901 - DNA, 16 bp, synthetic construct
  misc_feature 1..16: note = synthetic [barcode part1]
  source 1..16: mol_type = other DNA
acgcgtcgacagtaag

SEQ ID NO: 43902 - DNA, 16 bp, synthetic construct
  misc_feature 1..16: note = synthetic [barcode part1]
  source 1..16: mol_type = other DNA
tcaacagttgtgttcc

SEQ ID NO: 43903 - DNA, 16 bp, synthetic construct
  misc_feature 1..16: note = synthetic [barcode part1]
  source 1..16: mol_type = other DNA
tgcagactactgtctt

SEQ ID NO: 43904 - DNA, 16 bp, synthetic construct
  misc_feature 1..16: note = synthetic [barcode part1]
  source 1..16: mol_type = other DNA
agtcggcacactatac

SEQ ID NO: 43905 - DNA, 16 bp, synthetic construct
  misc_feature 1..16: note = synthetic [barcode part1]
  source 1..16: mol_type = other DNA
acgtatatacgcgcgt

SEQ ID NO: 43906 - DNA, 16 bp, synthetic construct
  misc_feature 1..16: note = synthetic [barcode part1]
  source 1..16: mol_type = other DNA
aatcgaatatcggcag

SEQ ID NO: 43907 - DNA, 16 bp, synthetic construct
  misc_feature 1..16: note = synthetic [barcode part1]
  source 1..16: mol_type = other DNA
actgtgatatccgttc

SEQ ID NO: 43908 - DNA, 16 bp, synthetic construct
  misc_feature 1..16: note = synthetic [barcode part1]
  source 1..16: mol_type = other DNA
tagtgcgcggtgaagt

SEQ ID NO: 43909 - DNA, 16 bp, synthetic construct
  misc_feature 1..16: note = synthetic [barcode part1]
  source 1..16: mol_type = other DNA
tgtacgattgtcactc

SEQ ID NO: 43910 - DNA, 16 bp, synthetic construct
  misc_feature 1..16: note = synthetic [barcode part1]
  source 1..16: mol_type = other DNA
aaggaataggcgcctc

SEQ ID NO: 43911 - DNA, 16 bp, synthetic construct
  misc_feature 1..16: note = synthetic [barcode part1]
  source 1..16: mol_type = other DNA
tgactctgcgtcgact

SEQ ID NO: 43912 - DNA, 16 bp, synthetic construct
  misc_feature 1..16: note = synthetic [barcode part1]
  source 1..16: mol_type = other DNA
gattacagtgccgact

SEQ ID NO: 43913 - DNA, 16 bp, synthetic construct
  misc_feature 1..16: note = synthetic [barcode part1]
  source 1..16: mol_type = other DNA
aggtactgacaaggcc

SEQ ID NO: 43914 - DNA, 16 bp, synthetic construct
  misc_feature 1..16: note = synthetic [barcode part1]
  source 1..16: mol_type = other DNA
tccgacgataggaacg

SEQ ID NO: 43915 - DNA, 16 bp, synthetic construct
  misc_feature 1..16: note = synthetic [barcode part1]
  source 1..16: mol_type = other DNA
aatccagtggcaactc

SEQ ID NO: 43916 - DNA, 16 bp, synthetic construct
  misc_feature 1..16: note = synthetic [barcode part1]
  source 1..16: mol_type = other DNA
tgtggttacacagtcg

SEQ ID NO: 43917 - DNA, 16 bp, synthetic construct
  misc_feature 1..16: note = synthetic [barcode part1]
  source 1..16: mol_type = other DNA
atcgtccacgaactcc

SEQ ID NO: 43918 - DNA, 16 bp, synthetic construct
  misc_feature 1..16: note = synthetic [barcode part1]
  source 1..16: mol_type = other DNA
caggtatattgaggac

SEQ ID NO: 43919 - DNA, 16 bp, synthetic construct
  misc_feature 1..16: note = synthetic [barcode part1]
  source 1..16: mol_type = other DNA
tctgcacaatcgttac

SEQ ID NO: 43920 - DNA, 16 bp, synthetic construct
  misc_feature 1..16: note = synthetic [barcode part1]
  source 1..16: mol_type = other DNA
attcacgactatctcg

SEQ ID NO: 43921 - DNA, 16 bp, synthetic construct
  misc_feature 1..16: note = synthetic [barcode part1]
  source 1..16: mol_type = other DNA
gttggccagaattctg

SEQ ID NO: 43922 - DNA, 16 bp, synthetic construct
  misc_feature 1..16: note = synthetic [barcode part1]
  source 1..16: mol_type = other DNA
tcacctccacactgag

SEQ ID NO: 43923 - DNA, 16 bp, synthetic construct
  misc_feature 1..16: note = synthetic [barcode part1]
  source 1..16: mol_type = other DNA
taagactgactccggt

SEQ ID NO: 43924 - DNA, 16 bp, synthetic construct
  misc_feature 1..16: note = synthetic [barcode part1]
  source 1..16: mol_type = other DNA
acggtagtggactcag

SEQ ID NO: 43925 - DNA, 16 bp, synthetic construct
  misc_feature 1..16: note = synthetic [barcode part1]
  source 1..16: mol_type = other DNA
cagttagtagtgtcgc

SEQ ID NO: 43926 - DNA, 16 bp, synthetic construct
  misc_feature 1..16: note = synthetic [barcode part1]
  source 1..16: mol_type = other DNA
gcagtgtcacaacgtt

SEQ ID NO: 43927 - DNA, 16 bp, synthetic construct
  misc_feature 1..16: note = synthetic [barcode part1]
  source 1..16: mol_type = other DNA
cacggtccttcgttag

SEQ ID NO: 43928 - DNA, 16 bp, synthetic construct
  misc_feature 1..16: note = synthetic [barcode part1]
  source 1..16: mol_type = other DNA
tacggatcgtcacctc

SEQ ID NO: 43929 - DNA, 16 bp, synthetic construct
  misc_feature 1..16: note = synthetic [barcode part1]
  source 1..16: mol_type = other DNA
acacggtattggcact

SEQ ID NO: 43930 - DNA, 16 bp, synthetic construct
  misc_feature 1..16: note = synthetic [barcode part1]
  source 1..16: mol_type = other DNA
tcttcgaacgtgttgt

SEQ ID NO: 43931 - DNA, 16 bp, synthetic construct
  misc_feature 1..16: note = synthetic [barcode part1]
  source 1..16: mol_type = other DNA
ttgacgaccacgttcc

SEQ ID NO: 43932 - DNA, 16 bp, synthetic construct
  misc_feature 1..16: note = synthetic [barcode part1]
  source 1..16: mol_type = other DNA
gtgtgcaagaaggagt

SEQ ID NO: 43933 - DNA, 16 bp, synthetic construct
  misc_feature 1..16: note = synthetic [barcode part1]
  source 1..16: mol_type = other DNA
gtgcagaagacacaag

SEQ ID NO: 43934 - DNA, 16 bp, synthetic construct
  misc_feature 1..16: note = synthetic [barcode part1]
  source 1..16: mol_type = other DNA
tagaggcactcggtag

SEQ ID NO: 43935 - DNA, 16 bp, synthetic construct
  misc_feature 1..16: note = synthetic [barcode part1]
  source 1..16: mol_type = other DNA
acctggacagatacct

SEQ ID NO: 43936 - DNA, 16 bp, synthetic construct
  misc_feature 1..16: note = synthetic [barcode part1]
  source 1..16: mol_type = other DNA
tcacgtattggcctcg

SEQ ID NO: 43937 - DNA, 16 bp, synthetic construct
  misc_feature 1..16: note = synthetic [barcode part1]
  source 1..16: mol_type = other DNA
ttaatacgagagaccg

SEQ ID NO: 43938 - DNA, 16 bp, synthetic construct
  misc_feature 1..16: note = synthetic [barcode part1]
  source 1..16: mol_type = other DNA
tggaggaaccgtgtac

SEQ ID NO: 43939 - DNA, 16 bp, synthetic construct
  misc_feature 1..16: note = synthetic [barcode part1]
  source 1..16: mol_type = other DNA
taccaggtctgtgcct

SEQ ID NO: 43940 - DNA, 16 bp, synthetic construct
  misc_feature 1..16: note = synthetic [barcode part1]
  source 1..16: mol_type = other DNA
attgtcgcacgtctcg

SEQ ID NO: 43941 - DNA, 16 bp, synthetic construct
  misc_feature 1..16: note = synthetic [barcode part1]
  source 1..16: mol_type = other DNA
tctaccgtgtaccgac

SEQ ID NO: 43942 - DNA, 16 bp, synthetic construct
  misc_feature 1..16: note = synthetic [barcode part1]
  source 1..16: mol_type = other DNA
ttatccggagttctgt

SEQ ID NO: 43943 - DNA, 16 bp, synthetic construct
  misc_feature 1..16: note = synthetic [barcode part1]
  source 1..16: mol_type = other DNA
cgtgacacagaacctt

SEQ ID NO: 43944 - DNA, 16 bp, synthetic construct
  misc_feature 1..16: note = synthetic [barcode part1]
  source 1..16: mol_type = other DNA
ttagaatctcacctgc

SEQ ID NO: 43945 - DNA, 16 bp, synthetic construct
  misc_feature 1..16: note = synthetic [barcode part1]
  source 1..16: mol_type = other DNA
gccgtcacgtatcttg

SEQ ID NO: 43946 - DNA, 16 bp, synthetic construct
  misc_feature 1..16: note = synthetic [barcode part1]
  source 1..16: mol_type = other DNA
aatcctgattcactcg

SEQ ID NO: 43947 - DNA, 16 bp, synthetic construct
  misc_feature 1..16: note = synthetic [barcode part1]
  source 1..16: mol_type = other DNA
tataacaaggcagacc

SEQ ID NO: 43948 - DNA, 16 bp, synthetic construct
  misc_feature 1..16: note = synthetic [barcode part1]
  source 1..16: mol_type = other DNA
tgcggcaagtagacac

SEQ ID NO: 43949 - DNA, 16 bp, synthetic construct
  misc_feature 1..16: note = synthetic [barcode part1]
  source 1..16: mol_type = other DNA
tgcctaataaccttcg

SEQ ID NO: 43950 - DNA, 16 bp, synthetic construct
  misc_feature 1..16: note = synthetic [barcode part1]
  source 1..16: mol_type = other DNA
taggtacgttggaggc

SEQ ID NO: 43951 - DNA, 16 bp, synthetic construct
  misc_feature 1..16: note = synthetic [barcode part1]
  source 1..16: mol_type = other DNA
tctcaccgaacaacag

SEQ ID NO: 43952 - DNA, 16 bp, synthetic construct
  misc_feature 1..16: note = synthetic [barcode part1]
  source 1..16: mol_type = other DNA
cgcgaacagacagtac

SEQ ID NO: 43953 - DNA, 16 bp, synthetic construct
  misc_feature 1..16: note = synthetic [barcode part1]
  source 1..16: mol_type = other DNA
aggtatcagacagtac

SEQ ID NO: 43954 - DNA, 16 bp, synthetic construct
  misc_feature 1..16: note = synthetic [barcode part1]
  source 1..16: mol_type = other DNA
cactggagaaccactt

SEQ ID NO: 43955 - DNA, 16 bp, synthetic construct
  misc_feature 1..16: note = synthetic [barcode part1]
  source 1..16: mol_type = other DNA
acgtggtactgtacgt

SEQ ID NO: 43956 - DNA, 16 bp, synthetic construct
  misc_feature 1..16: note = synthetic [barcode part1]
  source 1..16: mol_type = other DNA
cctaccaggttgtgtc

SEQ ID NO: 43957 - DNA, 16 bp, synthetic construct
  misc_feature 1..16: note = synthetic [barcode part1]
  source 1..16: mol_type = other DNA
caggagacgcacaatc

SEQ ID NO: 43958 - DNA, 16 bp, synthetic construct
  misc_feature 1..16: note = synthetic [barcode part1]
  source 1..16: mol_type = other DNA
tggaacctcttcctct

SEQ ID NO: 43959 - DNA, 16 bp, synthetic construct
  misc_feature 1..16: note = synthetic [barcode part1]
  source 1..16: mol_type = other DNA
taccaacgtgtcaacg

SEQ ID NO: 43960 - DNA, 16 bp, synthetic construct
  misc_feature 1..16: note = synthetic [barcode part1]
  source 1..16: mol_type = other DNA
tgtgtcacaactgcag

SEQ ID NO: 43961 - DNA, 16 bp, synthetic construct
  misc_feature 1..16: note = synthetic [barcode part1]
  source 1..16: mol_type = other DNA
gtgacacaccagttgt

SEQ ID NO: 43962 - DNA, 16 bp, synthetic construct
  misc_feature 1..16: note = synthetic [barcode part1]
  source 1..16: mol_type = other DNA
cctatcggtacgactc

SEQ ID NO: 43963 - DNA, 16 bp, synthetic construct
  misc_feature 1..16: note = synthetic [barcode part1]
  source 1..16: mol_type = other DNA
tgaaccacagtccaac

SEQ ID NO: 43964 - DNA, 16 bp, synthetic construct
  misc_feature 1..16: note = synthetic [barcode part1]
  source 1..16: mol_type = other DNA
cagttcagtccagtag

SEQ ID NO: 43965 - DNA, 16 bp, synthetic construct
  misc_feature 1..16: note = synthetic [barcode part1]
  source 1..16: mol_type = other DNA
gaggaacttgtgtggc

SEQ ID NO: 43966 - DNA, 16 bp, synthetic construct
  misc_feature 1..16: note = synthetic [barcode part1]
  source 1..16: mol_type = other DNA
cgcgtaatattggcgt

SEQ ID NO: 43967 - DNA, 16 bp, synthetic construct
  misc_feature 1..16: note = synthetic [barcode part1]
  source 1..16: mol_type = other DNA
caacggttctctgcgt

SEQ ID NO: 43968 - DNA, 16 bp, synthetic construct
  misc_feature 1..16: note = synthetic [barcode part1]
  source 1..16: mol_type = other DNA
taccaacctccgactg

SEQ ID NO: 43969 - DNA, 16 bp, synthetic construct
  misc_feature 1..16: note = synthetic [barcode part1]
  source 1..16: mol_type = other DNA
taacaatcggtctggc

SEQ ID NO: 43970 - DNA, 16 bp, synthetic construct
  misc_feature 1..16: note = synthetic [barcode part1]
  source 1..16: mol_type = other DNA
tcaccgtattcgcgac

SEQ ID NO: 43971 - DNA, 16 bp, synthetic construct
  misc_feature 1..16: note = synthetic [barcode part1]
  source 1..16: mol_type = other DNA
ccaagacgtagacggt

SEQ ID NO: 43972 - DNA, 16 bp, synthetic construct
  misc_feature 1..16: note = synthetic [barcode part1]
  source 1..16: mol_type = other DNA
gcacgtatacgacact

SEQ ID NO: 43973 - DNA, 16 bp, synthetic construct
  misc_feature 1..16: note = synthetic [barcode part1]
  source 1..16: mol_type = other DNA
tagtcgaccaaccaac

SEQ ID NO: 43974 - DNA, 16 bp, synthetic construct
  misc_feature 1..16: note = synthetic [barcode part1]
  source 1..16: mol_type = other DNA
aagagtagtggtccgc

SEQ ID NO: 43975 - DNA, 16 bp, synthetic construct
  misc_feature 1..16: note = synthetic [barcode part1]
  source 1..16: mol_type = other DNA
tacgcaaccgttattc

SEQ ID NO: 43976 - DNA, 16 bp, synthetic construct
  misc_feature 1..16: note = synthetic [barcode part1]
  source 1..16: mol_type = other DNA
tgcactctagaggtac

SEQ ID NO: 43977 - DNA, 16 bp, synthetic construct
  misc_feature 1..16: note = synthetic [barcode part1]
  source 1..16: mol_type = other DNA
tctagtcgttgtacgt

SEQ ID NO: 43978 - DNA, 16 bp, synthetic construct
  misc_feature 1..16: note = synthetic [barcode part1]
  source 1..16: mol_type = other DNA
cctaactgtcggcgtt

SEQ ID NO: 43979 - DNA, 16 bp, synthetic construct
  misc_feature 1..16: note = synthetic [barcode part1]
  source 1..16: mol_type = other DNA
ttaacgccgtgatcag

SEQ ID NO: 43980 - DNA, 16 bp, synthetic construct
  misc_feature 1..16: note = synthetic [barcode part1]
  source 1..16: mol_type = other DNA
tcacacacacaaccag

SEQ ID NO: 43981 - DNA, 16 bp, synthetic construct
  misc_feature 1..16: note = synthetic [barcode part1]
  source 1..16: mol_type = other DNA
gtacagtcaaccgtac

SEQ ID NO: 43982 - DNA, 16 bp, synthetic construct
  misc_feature 1..16: note = synthetic [barcode part1]
  source 1..16: mol_type = other DNA
aggtgcagtacaagag

SEQ ID NO: 43983 - DNA, 16 bp, synthetic construct
  misc_feature 1..16: note = synthetic [barcode part1]
  source 1..16: mol_type = other DNA
gttcgtccttattcgc

SEQ ID NO: 43984 - DNA, 16 bp, synthetic construct
  misc_feature 1..16: note = synthetic [barcode part1]
  source 1..16: mol_type = other DNA
gaagtaaccgcaggtc

SEQ ID NO: 43985 - DNA, 16 bp, synthetic construct
  misc_feature 1..16: note = synthetic [barcode part1]
  source 1..16: mol_type = other DNA
caagatagtaaccgtg

SEQ ID NO: 43986 - DNA, 16 bp, synthetic construct
  misc_feature 1..16: note = synthetic [barcode part1]
  source 1..16: mol_type = other DNA
gcacacgattgcaatc

SEQ ID NO: 43987 - DNA, 16 bp, synthetic construct
  misc_feature 1..16: note = synthetic [barcode part1]
  source 1..16: mol_type = other DNA
ccaacgaacgaagatt

SEQ ID NO: 43988 - DNA, 16 bp, synthetic construct
  misc_feature 1..16: note = synthetic [barcode part1]
  source 1..16: mol_type = other DNA
tgtggactacctaggt

SEQ ID NO: 43989 - DNA, 16 bp, synthetic construct
  misc_feature 1..16: note = synthetic [barcode part1]
  source 1..16: mol_type = other DNA
gtgtacacggtatcac

SEQ ID NO: 43990 - DNA, 16 bp, synthetic construct
  misc_feature 1..16: note = synthetic [barcode part1]
  source 1..16: mol_type = other DNA
gacgagatacactggc

SEQ ID NO: 43991 - DNA, 16 bp, synthetic construct
  misc_feature 1..16: note = synthetic [barcode part1]
  source 1..16: mol_type = other DNA
tctccggaccaatatt

SEQ ID NO: 43992 - DNA, 16 bp, synthetic construct
  misc_feature 1..16: note = synthetic [barcode part1]
  source 1..16: mol_type = other DNA
tctggtccttcctaac

SEQ ID NO: 43993 - DNA, 16 bp, synthetic construct
  misc_feature 1..16: note = synthetic [barcode part1]
  source 1..16: mol_type = other DNA
gccaattagtcagtcg

SEQ ID NO: 43994 - DNA, 16 bp, synthetic construct
  misc_feature 1..16: note = synthetic [barcode part1]
  source 1..16: mol_type = other DNA
gttgaggcaaccacag

SEQ ID NO: 43995 - DNA, 16 bp, synthetic construct
  misc_feature 1..16: note = synthetic [barcode part1]
  source 1..16: mol_type = other DNA
aagaggagattccgag

SEQ ID NO: 43996 - DNA, 16 bp, synthetic construct
  misc_feature 1..16: note = synthetic [barcode part1]
  source 1..16: mol_type = other DNA
accggcaagatcagac

SEQ ID NO: 43997 - DNA, 16 bp, synthetic construct
  misc_feature 1..16: note = synthetic [barcode part1]
  source 1..16: mol_type = other DNA
acgaggttcgcaagtg

SEQ ID NO: 43998 - DNA, 16 bp, synthetic construct
  misc_feature 1..16: note = synthetic [barcode part1]
  source 1..16: mol_type = other DNA
aagtgatccttgccag

SEQ ID NO: 43999 - DNA, 16 bp, synthetic construct
  misc_feature 1..16: note = synthetic [barcode part1]
  source 1..16: mol_type = other DNA
gtgaggacggtaatcc

SEQ ID NO: 44000 - DNA, 16 bp, synthetic construct
  misc_feature 1..16: note = synthetic [barcode part1]
  source 1..16: mol_type = other DNA
cgagtcagatccagtt

SEQ ID NO: 44001 - DNA, 16 bp, synthetic construct
  misc_feature 1..16: note = synthetic [barcode part1]
  source 1..16: mol_type = other DNA
attctaccgttggcgc

SEQ ID NO: 44002 - DNA, 16 bp, synthetic construct
  misc_feature 1..16: note = synthetic [barcode part1]
  source 1..16: mol_type = other DNA
gttactccaggacagt

SEQ ID NO: 44003 - DNA, 16 bp, synthetic construct
  misc_feature 1..16: note = synthetic [barcode part1]
  source 1..16: mol_type = other DNA
atcttgcgttcagact

SEQ ID NO: 44004 - DNA, 16 bp, synthetic construct
  misc_feature 1..16: note = synthetic [barcode part1]
  source 1..16: mol_type = other DNA
acacctcttaacggcc

SEQ ID NO: 44005 - DNA, 16 bp, synthetic construct
  misc_feature 1..16: note = synthetic [barcode part1]
  source 1..16: mol_type = other DNA
tgtggtgcctactcgt

SEQ ID NO: 44006 - DNA, 16 bp, synthetic construct
  misc_feature 1..16: note = synthetic [barcode part1]
  source 1..16: mol_type = other DNA
tgagtcgccgatagtt

SEQ ID NO: 44007 - DNA, 16 bp, synthetic construct
  misc_feature 1..16: note = synthetic [barcode part1]
  source 1..16: mol_type = other DNA
aagtaagactctaggc

SEQ ID NO: 44008 - DNA, 16 bp, synthetic construct
  misc_feature 1..16: note = synthetic [barcode part1]
  source 1..16: mol_type = other DNA
attgcgttagtggaag

SEQ ID NO: 44009 - DNA, 16 bp, synthetic construct
  misc_feature 1..16: note = synthetic [barcode part1]
  source 1..16: mol_type = other DNA
gcacaataaggtcaac

SEQ ID NO: 44010 - DNA, 16 bp, synthetic construct
  misc_feature 1..16: note = synthetic [barcode part1]
  source 1..16: mol_type = other DNA
tgatcgttctgcgaag

SEQ ID NO: 44011 - DNA, 16 bp, synthetic construct
  misc_feature 1..16: note = synthetic [barcode part1]
  source 1..16: mol_type = other DNA
acggaagttagatcac

SEQ ID NO: 44012 - DNA, 16 bp, synthetic construct
  misc_feature 1..16: note = synthetic [barcode part1]
  source 1..16: mol_type = other DNA
aatcaacctccggagt

SEQ ID NO: 44013 - DNA, 16 bp, synthetic construct
  misc_feature 1..16: note = synthetic [barcode part1]
  source 1..16: mol_type = other DNA
cgacagtaagacgcgt

SEQ ID NO: 44014 - DNA, 16 bp, synthetic construct
  misc_feature 1..16: note = synthetic [barcode part1]
  source 1..16: mol_type = other DNA
gcgttataggccttag

SEQ ID NO: 44015 - DNA, 16 bp, synthetic construct
  misc_feature 1..16: note = synthetic [barcode part1]
  source 1..16: mol_type = other DNA
tacacaggtccagatc

SEQ ID NO: 44016 - DNA, 16 bp, synthetic construct
  misc_feature 1..16: note = synthetic [barcode part1]
  source 1..16: mol_type = other DNA
ttgcggcctagaattg

SEQ ID NO: 44017 - DNA, 16 bp, synthetic construct
  misc_feature 1..16: note = synthetic [barcode part1]
  source 1..16: mol_type = other DNA
atctgactgtgaagag

SEQ ID NO: 44018 - DNA, 16 bp, synthetic construct
  misc_feature 1..16: note = synthetic [barcode part1]
  source 1..16: mol_type = other DNA
ttcgagaacgcgtatc

SEQ ID NO: 44019 - DNA, 16 bp, synthetic construct
  misc_feature 1..16: note = synthetic [barcode part1]
  source 1..16: mol_type = other DNA
gtccgtgattgccttg

SEQ ID NO: 44020 - DNA, 16 bp, synthetic construct
  misc_feature 1..16: note = synthetic [barcode part1]
  source 1..16: mol_type = other DNA
aactaacgtgccacgt

SEQ ID NO: 44021 - DNA, 16 bp, synthetic construct
  misc_feature 1..16: note = synthetic [barcode part1]
  source 1..16: mol_type = other DNA
aggtcagacgtgtcag

SEQ ID NO: 44022 - DNA, 16 bp, synthetic construct
  misc_feature 1..16: note = synthetic [barcode part1]
  source 1..16: mol_type = other DNA
ataggtctaactcctc

SEQ ID NO: 44023 - DNA, 16 bp, synthetic construct
  misc_feature 1..16: note = synthetic [barcode part1]
  source 1..16: mol_type = other DNA
gcgcaggtctgataag

SEQ ID NO: 44024 - DNA, 16 bp, synthetic construct
  misc_feature 1..16: note = synthetic [barcode part1]
  source 1..16: mol_type = other DNA
tagtgcggaagtaact

SEQ ID NO: 44025 - DNA, 16 bp, synthetic construct
  misc_feature 1..16: note = synthetic [barcode part1]
  source 1..16: mol_type = other DNA
attcttaagaccgcct

SEQ ID NO: 44026 - DNA, 16 bp, synthetic construct
  misc_feature 1..16: note = synthetic [barcode part1]
  source 1..16: mol_type = other DNA
gcgccttggaagtatt

SEQ ID NO: 44027 - DNA, 16 bp, synthetic construct
  misc_feature 1..16: note = synthetic [barcode part1]
  source 1..16: mol_type = other DNA
ttacggttgcgatacg

SEQ ID NO: 44028 - DNA, 16 bp, synthetic construct
  misc_feature 1..16: note = synthetic [barcode part1]
  source 1..16: mol_type = other DNA
taaccgttccgactcg

SEQ ID NO: 44029 - DNA, 16 bp, synthetic construct
  misc_feature 1..16: note = synthetic [barcode part1]
  source 1..16: mol_type = other DNA
tacggacggacttgtt

SEQ ID NO: 44030 - DNA, 16 bp, synthetic construct
  misc_feature 1..16: note = synthetic [barcode part1]
  source 1..16: mol_type = other DNA
tagacacactgttctc

SEQ ID NO: 44031 - DNA, 16 bp, synthetic construct
  misc_feature 1..16: note = synthetic [barcode part1]
  source 1..16: mol_type = other DNA
tcgagtacgttattcc

SEQ ID NO: 44032 - DNA, 16 bp, synthetic construct
  misc_feature 1..16: note = synthetic [barcode part1]
  source 1..16: mol_type = other DNA
ccttaacggaagtcgt

SEQ ID NO: 44033 - DNA, 16 bp, synthetic construct
  misc_feature 1..16: note = synthetic [barcode part1]
  source 1..16: mol_type = other DNA
gaggtgttgacttaag

SEQ ID NO: 44034 - DNA, 16 bp, synthetic construct
  misc_feature 1..16: note = synthetic [barcode part1]
  source 1..16: mol_type = other DNA
gttacgtgatcacacg

SEQ ID NO: 44035 - DNA, 16 bp, synthetic construct
  misc_feature 1..16: note = synthetic [barcode part1]
  source 1..16: mol_type = other DNA
ccgtgcctctaacaac

SEQ ID NO: 44036 - DNA, 16 bp, synthetic construct
  misc_feature 1..16: note = synthetic [barcode part1]
  source 1..16: mol_type = other DNA
aggtctaatctggacc

SEQ ID NO: 44037 - DNA, 16 bp, synthetic construct
  misc_feature 1..16: note = synthetic [barcode part1]
  source 1..16: mol_type = other DNA
tctgcactctctgtac

SEQ ID NO: 44038 - DNA, 16 bp, synthetic construct
  misc_feature 1..16: note = synthetic [barcode part1]
  source 1..16: mol_type = other DNA
agtgccaaggatctct

SEQ ID NO: 44039 - DNA, 16 bp, synthetic construct
  misc_feature 1..16: note = synthetic [barcode part1]
  source 1..16: mol_type = other DNA
atactggttccaccgc

SEQ ID NO: 44040 - DNA, 16 bp, synthetic construct
  misc_feature 1..16: note = synthetic [barcode part1]
  source 1..16: mol_type = other DNA
gaggttggttgagaag

SEQ ID NO: 44041 - DNA, 16 bp, synthetic construct
  misc_feature 1..16: note = synthetic [barcode part1]
  source 1..16: mol_type = other DNA
tgtaattggttgcgcg

SEQ ID NO: 44042 - DNA, 16 bp, synthetic construct
  misc_feature 1..16: note = synthetic [barcode part1]
  source 1..16: mol_type = other DNA
cactaccttcgcagac

SEQ ID NO: 44043 - DNA, 16 bp, synthetic construct
  misc_feature 1..16: note = synthetic [barcode part1]
  source 1..16: mol_type = other DNA
gactatccagatcgtg

SEQ ID NO: 44044 - DNA, 16 bp, synthetic construct
  misc_feature 1..16: note = synthetic [barcode part1]
  source 1..16: mol_type = other DNA
gccagtgacttagatc

SEQ ID NO: 44045 - DNA, 16 bp, synthetic construct
  misc_feature 1..16: note = synthetic [barcode part1]
  source 1..16: mol_type = other DNA
cgtggtgaagtgaacc

SEQ ID NO: 44046 - DNA, 16 bp, synthetic construct
  misc_feature 1..16: note = synthetic [barcode part1]
  source 1..16: mol_type = other DNA
gactacaaggatcggc

SEQ ID NO: 44047 - DNA, 16 bp, synthetic construct
  misc_feature 1..16: note = synthetic [barcode part1]
  source 1..16: mol_type = other DNA
gataggcgcgatactg

SEQ ID NO: 44048 - DNA, 16 bp, synthetic construct
  misc_feature 1..16: note = synthetic [barcode part1]
  source 1..16: mol_type = other DNA
gtgaaggagttgccac

SEQ ID NO: 44049 - DNA, 16 bp, synthetic construct
  misc_feature 1..16: note = synthetic [barcode part1]
  source 1..16: mol_type = other DNA
tgaattgtgcgttcct

SEQ ID NO: 44050 - DNA, 16 bp, synthetic construct
  misc_feature 1..16: note = synthetic [barcode part1]
  source 1..16: mol_type = other DNA
cgaattgaaggtacac

SEQ ID NO: 44051 - DNA, 16 bp, synthetic construct
  misc_feature 1..16: note = synthetic [barcode part1]
  source 1..16: mol_type = other DNA
cgataacggtctagtc

SEQ ID NO: 44052 - DNA, 16 bp, synthetic construct
  misc_feature 1..16: note = synthetic [barcode part1]
  source 1..16: mol_type = other DNA
gaggtagacagtagac

SEQ ID NO: 44053 - DNA, 16 bp, synthetic construct
  misc_feature 1..16: note = synthetic [barcode part1]
  source 1..16: mol_type = other DNA
taaggtcgcgtgtatc

SEQ ID NO: 44054 - DNA, 16 bp, synthetic construct
  misc_feature 1..16: note = synthetic [barcode part1]
  source 1..16: mol_type = other DNA
tcgtcgtatagtggac

SEQ ID NO: 44055 - DNA, 16 bp, synthetic construct
  misc_feature 1..16: note = synthetic [barcode part1]
  source 1..16: mol_type = other DNA
ttaggcgaggttcgtt

SEQ ID NO: 44056 - DNA, 16 bp, synthetic construct
  misc_feature 1..16: note = synthetic [barcode part1]
  source 1..16: mol_type = other DNA
attgaagtgcgtagtg

SEQ ID NO: 44057 - DNA, 16 bp, synthetic construct
  misc_feature 1..16: note = synthetic [barcode part1]
  source 1..16: mol_type = other DNA
tcttcctcgtggtatc

SEQ ID NO: 44058 - DNA, 16 bp, synthetic construct
  misc_feature 1..16: note = synthetic [barcode part1]
  source 1..16: mol_type = other DNA
cgattctcaacacgtt

SEQ ID NO: 44059 - DNA, 16 bp, synthetic construct
  misc_feature 1..16: note = synthetic [barcode part1]
  source 1..16: mol_type = other DNA
ttacgccagtaattcc

SEQ ID NO: 44060 - DNA, 16 bp, synthetic construct
  misc_feature 1..16: note = synthetic [barcode part1]
  source 1..16: mol_type = other DNA
atccagttacgttctg

SEQ ID NO: 44061 - DNA, 16 bp, synthetic construct
  misc_feature 1..16: note = synthetic [barcode part1]
  source 1..16: mol_type = other DNA
cgcgtactaattgacg

SEQ ID NO: 44062 - DNA, 16 bp, synthetic construct
  misc_feature 1..16: note = synthetic [barcode part1]
  source 1..16: mol_type = other DNA
aaggacaagacacggt

SEQ ID NO: 44063 - DNA, 16 bp, synthetic construct
  misc_feature 1..16: note = synthetic [barcode part1]
  source 1..16: mol_type = other DNA
agagaacgccttctgt

SEQ ID NO: 44064 - DNA, 16 bp, synthetic construct
  misc_feature 1..16: note = synthetic [barcode part1]
  source 1..16: mol_type = other DNA
agtacgtactggtgtc

SEQ ID NO: 44065 - DNA, 16 bp, synthetic construct
  misc_feature 1..16: note = synthetic [barcode part1]
  source 1..16: mol_type = other DNA
tgcgcagaagttggac

SEQ ID NO: 44066 - DNA, 16 bp, synthetic construct
  misc_feature 1..16: note = synthetic [barcode part1]
  source 1..16: mol_type = other DNA
agatacaaccggaccg

SEQ ID NO: 44067 - DNA, 16 bp, synthetic construct
  misc_feature 1..16: note = synthetic [barcode part1]
  source 1..16: mol_type = other DNA
aggtagatcgtccact

SEQ ID NO: 44068 - DNA, 16 bp, synthetic construct
  misc_feature 1..16: note = synthetic [barcode part1]
  source 1..16: mol_type = other DNA
cgagattattgtggcc

SEQ ID NO: 44069 - DNA, 16 bp, synthetic construct
  misc_feature 1..16: note = synthetic [barcode part1]
  source 1..16: mol_type = other DNA
gttggcacactccact

SEQ ID NO: 44070 - DNA, 16 bp, synthetic construct
  misc_feature 1..16: note = synthetic [barcode part1]
  source 1..16: mol_type = other DNA
aatcacgaggatcaac

SEQ ID NO: 44071 - DNA, 16 bp, synthetic construct
  misc_feature 1..16: note = synthetic [barcode part1]
  source 1..16: mol_type = other DNA
ccagtagttaccaggt

SEQ ID NO: 44072 - DNA, 16 bp, synthetic construct
  misc_feature 1..16: note = synthetic [barcode part1]
  source 1..16: mol_type = other DNA
ttccttctgcgatacc

SEQ ID NO: 44073 - DNA, 16 bp, synthetic construct
  misc_feature 1..16: note = synthetic [barcode part1]
  source 1..16: mol_type = other DNA
cggcaactcttcacac

SEQ ID NO: 44074 - DNA, 16 bp, synthetic construct
  misc_feature 1..16: note = synthetic [barcode part1]
  source 1..16: mol_type = other DNA
caagtcgcacgagagt

SEQ ID NO: 44075 - DNA, 16 bp, synthetic construct
  misc_feature 1..16: note = synthetic [barcode part1]
  source 1..16: mol_type = other DNA
tcgtctcctggtacag

SEQ ID NO: 44076 - DNA, 16 bp, synthetic construct
  misc_feature 1..16: note = synthetic [barcode part1]
  source 1..16: mol_type = other DNA
acgactaccgacttcc

SEQ ID NO: 44077 - DNA, 16 bp, synthetic construct
  misc_feature 1..16: note = synthetic [barcode part1]
  source 1..16: mol_type = other DNA
cgtcgtgtaactagtg

SEQ ID NO: 44078 - DNA, 16 bp, synthetic construct
  misc_feature 1..16: note = synthetic [barcode part1]
  source 1..16: mol_type = other DNA
tactgaggtaggaatc

SEQ ID NO: 44079 - DNA, 16 bp, synthetic construct
  misc_feature 1..16: note = synthetic [barcode part1]
  source 1..16: mol_type = other DNA
gtgaagagttgagtct

SEQ ID NO: 44080 - DNA, 16 bp, synthetic construct
  misc_feature 1..16: note = synthetic [barcode part1]
  source 1..16: mol_type = other DNA
agtgactgtcactgac

SEQ ID NO: 44081 - DNA, 16 bp, synthetic construct
  misc_feature 1..16: note = synthetic [barcode part1]
  source 1..16: mol_type = other DNA
cagatacctaacgcac

SEQ ID NO: 44082 - DNA, 16 bp, synthetic construct
  misc_feature 1..16: note = synthetic [barcode part1]
  source 1..16: mol_type = other DNA
attctcgaacggtctt

SEQ ID NO: 44083 - DNA, 16 bp, synthetic construct
  misc_feature 1..16: note = synthetic [barcode part1]
  source 1..16: mol_type = other DNA
ccggttgttaaccaag

SEQ ID NO: 44084 - DNA, 16 bp, synthetic construct
  misc_feature 1..16: note = synthetic [barcode part1]
  source 1..16: mol_type = other DNA
tacacggtcgtcacct

SEQ ID NO: 44085 - DNA, 16 bp, synthetic construct
  misc_feature 1..16: note = synthetic [barcode part1]
  source 1..16: mol_type = other DNA
tgcgcgtaactaatcg

SEQ ID NO: 44086 - DNA, 16 bp, synthetic construct
  misc_feature 1..16: note = synthetic [barcode part1]
  source 1..16: mol_type = other DNA
cgtgtgaagacactct

SEQ ID NO: 44087 - DNA, 16 bp, synthetic construct
  misc_feature 1..16: note = synthetic [barcode part1]
  source 1..16: mol_type = other DNA
caccaatctggtctcg

SEQ ID NO: 44088 - DNA, 16 bp, synthetic construct
  misc_feature 1..16: note = synthetic [barcode part1]
  source 1..16: mol_type = other DNA
cctacctgcagtgttg

SEQ ID NO: 44089 - DNA, 16 bp, synthetic construct
  misc_feature 1..16: note = synthetic [barcode part1]
  source 1..16: mol_type = other DNA
aattggaccaccgttg

SEQ ID NO: 44090 - DNA, 16 bp, synthetic construct
  misc_feature 1..16: note = synthetic [barcode part1]
  source 1..16: mol_type = other DNA
agtaccagttggtcac

SEQ ID NO: 44091 - DNA, 16 bp, synthetic construct
  misc_feature 1..16: note = synthetic [barcode part1]
  source 1..16: mol_type = other DNA
tggtaaccgacgattc

SEQ ID NO: 44092 - DNA, 16 bp, synthetic construct
  misc_feature 1..16: note = synthetic [barcode part1]
  source 1..16: mol_type = other DNA
aggttattcgtgcctt

SEQ ID NO: 44093 - DNA, 16 bp, synthetic construct
  misc_feature 1..16: note = synthetic [barcode part1]
  source 1..16: mol_type = other DNA
attatcctgtctaggc

SEQ ID NO: 44094 - DNA, 16 bp, synthetic construct
  misc_feature 1..16: note = synthetic [barcode part1]
  source 1..16: mol_type = other DNA
aggaggcacctagact

SEQ ID NO: 44095 - DNA, 16 bp, synthetic construct
  misc_feature 1..16: note = synthetic [barcode part1]
  source 1..16: mol_type = other DNA
gatagtcttggtgacc

SEQ ID NO: 44096 - DNA, 16 bp, synthetic construct
  misc_feature 1..16: note = synthetic [barcode part1]
  source 1..16: mol_type = other DNA
gtgcgatcgatacact

SEQ ID NO: 44097 - DNA, 16 bp, synthetic construct
  misc_feature 1..16: note = synthetic [barcode part1]
  source 1..16: mol_type = other DNA
cagacagatctgttcg

SEQ ID NO: 44098 - DNA, 16 bp, synthetic construct
  misc_feature 1..16: note = synthetic [barcode part1]
  source 1..16: mol_type = other DNA
gcaattccagatcacg

SEQ ID NO: 44099 - DNA, 16 bp, synthetic construct
  misc_feature 1..16: note = synthetic [barcode part1]
  source 1..16: mol_type = other DNA
ttgccaacaacaaccg

SEQ ID NO: 44100 - DNA, 16 bp, synthetic construct
  misc_feature 1..16: note = synthetic [barcode part1]
  source 1..16: mol_type = other DNA
cgacctgattcctacg

SEQ ID NO: 44101 - DNA, 16 bp, synthetic construct
  misc_feature 1..16: note = synthetic [barcode part1]
  source 1..16: mol_type = other DNA
gtccaataaggatacg

SEQ ID NO: 44102 - DNA, 16 bp, synthetic construct
  misc_feature 1..16: note = synthetic [barcode part1]
  source 1..16: mol_type = other DNA
actgtctgttcgcggt

SEQ ID NO: 44103 - DNA, 16 bp, synthetic construct
  misc_feature 1..16: note = synthetic [barcode part1]
  source 1..16: mol_type = other DNA
cgtcgaatcgcacctt

SEQ ID NO: 44104 - DNA, 16 bp, synthetic construct
  misc_feature 1..16: note = synthetic [barcode part1]
  source 1..16: mol_type = other DNA
actaacctgactggtg

SEQ ID NO: 44105 - DNA, 16 bp, synthetic construct
  misc_feature 1..16: note = synthetic [barcode part1]
  source 1..16: mol_type = other DNA
gacgaacctatagtag

SEQ ID NO: 44106 - DNA, 16 bp, synthetic construct
  misc_feature 1..16: note = synthetic [barcode part1]
  source 1..16: mol_type = other DNA
tgcggcagtctattcc

SEQ ID NO: 44107 - DNA, 16 bp, synthetic construct
  misc_feature 1..16: note = synthetic [barcode part1]
  source 1..16: mol_type = other DNA
tcgactctagactcgc

SEQ ID NO: 44108 - DNA, 16 bp, synthetic construct
  misc_feature 1..16: note = synthetic [barcode part1]
  source 1..16: mol_type = other DNA
caggacctagtactac

SEQ ID NO: 44109 - DNA, 16 bp, synthetic construct
  misc_feature 1..16: note = synthetic [barcode part1]
  source 1..16: mol_type = other DNA
agacttcaggactctg

SEQ ID NO: 44110 - DNA, 16 bp, synthetic construct
  misc_feature 1..16: note = synthetic [barcode part1]
  source 1..16: mol_type = other DNA
tcgattcagtgcactt

SEQ ID NO: 44111 - DNA, 16 bp, synthetic construct
  misc_feature 1..16: note = synthetic [barcode part1]
  source 1..16: mol_type = other DNA
agaatcctcacggtac

SEQ ID NO: 44112 - DNA, 16 bp, synthetic construct
  misc_feature 1..16: note = synthetic [barcode part1]
  source 1..16: mol_type = other DNA
tacaggtgcggtagac

SEQ ID NO: 44113 - DNA, 16 bp, synthetic construct
  misc_feature 1..16: note = synthetic [barcode part1]
  source 1..16: mol_type = other DNA
ttcctctataccacgc

SEQ ID NO: 44114 - DNA, 16 bp, synthetic construct
  misc_feature 1..16: note = synthetic [barcode part1]
  source 1..16: mol_type = other DNA
aacgtgcgcgtcaatt

SEQ ID NO: 44115 - DNA, 16 bp, synthetic construct
  misc_feature 1..16: note = synthetic [barcode part1]
  source 1..16: mol_type = other DNA
ttgtgtcgtggtccgt

SEQ ID NO: 44116 - DNA, 16 bp, synthetic construct
  misc_feature 1..16: note = synthetic [barcode part1]
  source 1..16: mol_type = other DNA
tattgccggcgtgtct

SEQ ID NO: 44117 - DNA, 16 bp, synthetic construct
  misc_feature 1..16: note = synthetic [barcode part1]
  source 1..16: mol_type = other DNA
ttacgcagtatcggtg

SEQ ID NO: 44118 - DNA, 16 bp, synthetic construct
  misc_feature 1..16: note = synthetic [barcode part1]
  source 1..16: mol_type = other DNA
gactgataccgtaacc

SEQ ID NO: 44119 - DNA, 16 bp, synthetic construct
  misc_feature 1..16: note = synthetic [barcode part1]
  source 1..16: mol_type = other DNA
caggactgatcaacct

SEQ ID NO: 44120 - DNA, 16 bp, synthetic construct
  misc_feature 1..16: note = synthetic [barcode part1]
  source 1..16: mol_type = other DNA
gtgttctgccgagtct

SEQ ID NO: 44121 - DNA, 16 bp, synthetic construct
  misc_feature 1..16: note = synthetic [barcode part1]
  source 1..16: mol_type = other DNA
tccaaggattgcggtt

SEQ ID NO: 44122 - DNA, 16 bp, synthetic construct
  misc_feature 1..16: note = synthetic [barcode part1]
  source 1..16: mol_type = other DNA
atctcgagtcagtcag

SEQ ID NO: 44123 - DNA, 16 bp, synthetic construct
  misc_feature 1..16: note = synthetic [barcode part1]
  source 1..16: mol_type = other DNA
tcctctgtaccaatag

SEQ ID NO: 44124 - DNA, 16 bp, synthetic construct
  misc_feature 1..16: note = synthetic [barcode part1]
  source 1..16: mol_type = other DNA
taagtcacagtggcct

SEQ ID NO: 44125 - DNA, 16 bp, synthetic construct
  misc_feature 1..16: note = synthetic [barcode part1]
  source 1..16: mol_type = other DNA
cgtgataggactctac

SEQ ID NO: 44126 - DNA, 16 bp, synthetic construct
  misc_feature 1..16: note = synthetic [barcode part1]
  source 1..16: mol_type = other DNA
tactgtggtcaaccag

SEQ ID NO: 44127 - DNA, 16 bp, synthetic construct
  misc_feature 1..16: note = synthetic [barcode part1]
  source 1..16: mol_type = other DNA
tcaggtgttgcctcgt

SEQ ID NO: 44128 - DNA, 16 bp, synthetic construct
  misc_feature 1..16: note = synthetic [barcode part1]
  source 1..16: mol_type = other DNA
acacacaactggttgc

SEQ ID NO: 44129 - DNA, 16 bp, synthetic construct
  misc_feature 1..16: note = synthetic [barcode part1]
  source 1..16: mol_type = other DNA
cgacaactcgaatcgt

SEQ ID NO: 44130 - DNA, 16 bp, synthetic construct
  misc_feature 1..16: note = synthetic [barcode part1]
  source 1..16: mol_type = other DNA
tacggcgtctactcac

SEQ ID NO: 44131 - DNA, 16 bp, synthetic construct
  misc_feature 1..16: note = synthetic [barcode part1]
  source 1..16: mol_type = other DNA
gcacgacttccaactc

SEQ ID NO: 44132 - DNA, 16 bp, synthetic construct
  misc_feature 1..16: note = synthetic [barcode part1]
  source 1..16: mol_type = other DNA
gaggcaacgaacgttc

SEQ ID NO: 44133 - DNA, 16 bp, synthetic construct
  misc_feature 1..16: note = synthetic [barcode part1]
  source 1..16: mol_type = other DNA
agtcctcaattgtacc

SEQ ID NO: 44134 - DNA, 16 bp, synthetic construct
  misc_feature 1..16: note = synthetic [barcode part1]
  source 1..16: mol_type = other DNA
attgcgaacaacgtcc

SEQ ID NO: 44135 - DNA, 16 bp, synthetic construct
  misc_feature 1..16: note = synthetic [barcode part1]
  source 1..16: mol_type = other DNA
ttcagtcgtaccgatt

SEQ ID NO: 44136 - DNA, 16 bp, synthetic construct
  misc_feature 1..16: note = synthetic [barcode part1]
  source 1..16: mol_type = other DNA
actacttaggttcgtc

SEQ ID NO: 44137 - DNA, 16 bp, synthetic construct
  misc_feature 1..16: note = synthetic [barcode part1]
  source 1..16: mol_type = other DNA
gttcgcctgaataggt

SEQ ID NO: 44138 - DNA, 16 bp, synthetic construct
  misc_feature 1..16: note = synthetic [barcode part1]
  source 1..16: mol_type = other DNA
cgtgcaataggagatt

SEQ ID NO: 44139 - DNA, 16 bp, synthetic construct
  misc_feature 1..16: note = synthetic [barcode part1]
  source 1..16: mol_type = other DNA
tggagacacttaacag

SEQ ID NO: 44140 - DNA, 16 bp, synthetic construct
  misc_feature 1..16: note = synthetic [barcode part1]
  source 1..16: mol_type = other DNA
aagaggcaagtacttc

SEQ ID NO: 44141 - DNA, 16 bp, synthetic construct
  misc_feature 1..16: note = synthetic [barcode part1]
  source 1..16: mol_type = other DNA
cgttactaacgcactt

SEQ ID NO: 44142 - DNA, 16 bp, synthetic construct
  misc_feature 1..16: note = synthetic [barcode part1]
  source 1..16: mol_type = other DNA
tccgttacgtgttagt

SEQ ID NO: 44143 - DNA, 16 bp, synthetic construct
  misc_feature 1..16: note = synthetic [barcode part1]
  source 1..16: mol_type = other DNA
acgtatcagacactcg

SEQ ID NO: 44144 - DNA, 16 bp, synthetic construct
  misc_feature 1..16: note = synthetic [barcode part1]
  source 1..16: mol_type = other DNA
ttaggtgagtagagtc

SEQ ID NO: 44145 - DNA, 16 bp, synthetic construct
  misc_feature 1..16: note = synthetic [barcode part1]
  source 1..16: mol_type = other DNA
gtagattgaccgcact

SEQ ID NO: 44146 - DNA, 16 bp, synthetic construct
  misc_feature 1..16: note = synthetic [barcode part1]
  source 1..16: mol_type = other DNA
taattgtgaaccggag

SEQ ID NO: 44147 - DNA, 16 bp, synthetic construct
  misc_feature 1..16: note = synthetic [barcode part1]
  source 1..16: mol_type = other DNA
gcctaccaagtctcgt

SEQ ID NO: 44148 - DNA, 16 bp, synthetic construct
  misc_feature 1..16: note = synthetic [barcode part1]
  source 1..16: mol_type = other DNA
cggtatacctccagtc

SEQ ID NO: 44149 - DNA, 16 bp, synthetic construct
  misc_feature 1..16: note = synthetic [barcode part1]
  source 1..16: mol_type = other DNA
cagtaggcaagacaag

SEQ ID NO: 44150 - DNA, 16 bp, synthetic construct
  misc_feature 1..16: note = synthetic [barcode part1]
  source 1..16: mol_type = other DNA
actcagattgtggacc

SEQ ID NO: 44151 - DNA, 16 bp, synthetic construct
  misc_feature 1..16: note = synthetic [barcode part1]
  source 1..16: mol_type = other DNA
tgcagttgtgcaactg

SEQ ID NO: 44152 - DNA, 16 bp, synthetic construct
  misc_feature 1..16: note = synthetic [barcode part1]
  source 1..16: mol_type = other DNA
agacgtgtcaacgacg

SEQ ID NO: 44153 - DNA, 16 bp, synthetic construct
  misc_feature 1..16: note = synthetic [barcode part1]
  source 1..16: mol_type = other DNA
attatagtcgtctgcc

SEQ ID NO: 44154 - DNA, 16 bp, synthetic construct
  misc_feature 1..16: note = synthetic [barcode part1]
  source 1..16: mol_type = other DNA
tgagtcggtatctctt

SEQ ID NO: 44155 - DNA, 16 bp, synthetic construct
  misc_feature 1..16: note = synthetic [barcode part1]
  source 1..16: mol_type = other DNA
cctgagaagagtcctt

SEQ ID NO: 44156 - DNA, 16 bp, synthetic construct
  misc_feature 1..16: note = synthetic [barcode part1]
  source 1..16: mol_type = other DNA
caatatagaggcaacc

SEQ ID NO: 44157 - DNA, 16 bp, synthetic construct
  misc_feature 1..16: note = synthetic [barcode part1]
  source 1..16: mol_type = other DNA
taggacctcctctctt

SEQ ID NO: 44158 - DNA, 16 bp, synthetic construct
  misc_feature 1..16: note = synthetic [barcode part1]
  source 1..16: mol_type = other DNA
ttcagttcgaccgtgc

SEQ ID NO: 44159 - DNA, 16 bp, synthetic construct
  misc_feature 1..16: note = synthetic [barcode part1]
  source 1..16: mol_type = other DNA
aacacgtgccgtatac

SEQ ID NO: 44160 - DNA, 16 bp, synthetic construct
  misc_feature 1..16: note = synthetic [barcode part1]
  source 1..16: mol_type = other DNA
gtctccagtaatctac

SEQ ID NO: 44161 - DNA, 16 bp, synthetic construct
  misc_feature 1..16: note = synthetic [barcode part1]
  source 1..16: mol_type = other DNA
tccagagaccgtaact

SEQ ID NO: 44162 - DNA, 16 bp, synthetic construct
  misc_feature 1..16: note = synthetic [barcode part1]
  source 1..16: mol_type = other DNA
gacggatattcgttcg

SEQ ID NO: 44163 - DNA, 16 bp, synthetic construct
  misc_feature 1..16: note = synthetic [barcode part1]
  source 1..16: mol_type = other DNA
gtgtaggcgaagatag

SEQ ID NO: 44164 - DNA, 16 bp, synthetic construct
  misc_feature 1..16: note = synthetic [barcode part1]
  source 1..16: mol_type = other DNA
cagacactgtggactt

SEQ ID NO: 44165 - DNA, 16 bp, synthetic construct
  misc_feature 1..16: note = synthetic [barcode part1]
  source 1..16: mol_type = other DNA
tatagtagacgtcgcc

SEQ ID NO: 44166 - DNA, 16 bp, synthetic construct
  misc_feature 1..16: note = synthetic [barcode part1]
  source 1..16: mol_type = other DNA
agttggcaggaagagt

SEQ ID NO: 44167 - DNA, 16 bp, synthetic construct
  misc_feature 1..16: note = synthetic [barcode part1]
  source 1..16: mol_type = other DNA
gagaccagactgtacg

SEQ ID NO: 44168 - DNA, 16 bp, synthetic construct
  misc_feature 1..16: note = synthetic [barcode part1]
  source 1..16: mol_type = other DNA
gacgccagtattgtac

SEQ ID NO: 44169 - DNA, 16 bp, synthetic construct
  misc_feature 1..16: note = synthetic [barcode part1]
  source 1..16: mol_type = other DNA
tcgtgttacagtctgt

SEQ ID NO: 44170 - DNA, 16 bp, synthetic construct
  misc_feature 1..16: note = synthetic [barcode part1]
  source 1..16: mol_type = other DNA
ttcacgaacgagtctg

SEQ ID NO: 44171 - DNA, 16 bp, synthetic construct
  misc_feature 1..16: note = synthetic [barcode part1]
  source 1..16: mol_type = other DNA
cgtctataacgtcgtt

SEQ ID NO: 44172 - DNA, 16 bp, synthetic construct
  misc_feature 1..16: note = synthetic [barcode part1]
  source 1..16: mol_type = other DNA
gatataccttctcggt

SEQ ID NO: 44173 - DNA, 16 bp, synthetic construct
  misc_feature 1..16: note = synthetic [barcode part1]
  source 1..16: mol_type = other DNA
tgccaagtctagtggt

SEQ ID NO: 44174 - DNA, 16 bp, synthetic construct
  misc_feature 1..16: note = synthetic [barcode part1]
  source 1..16: mol_type = other DNA
cgtcacctatctcact

SEQ ID NO: 44175 - DNA, 16 bp, synthetic construct
  misc_feature 1..16: note = synthetic [barcode part1]
  source 1..16: mol_type = other DNA
gacaagagtgtgactt

SEQ ID NO: 44176 - DNA, 16 bp, synthetic construct
  misc_feature 1..16: note = synthetic [barcode part1]
  source 1..16: mol_type = other DNA
tatcgacgagagattg

SEQ ID NO: 44177 - DNA, 16 bp, synthetic construct
  misc_feature 1..16: note = synthetic [barcode part1]
  source 1..16: mol_type = other DNA
atagattctcttggcc

SEQ ID NO: 44178 - DNA, 16 bp, synthetic construct
  misc_feature 1..16: note = synthetic [barcode part1]
  source 1..16: mol_type = other DNA
atcaaccacgtgtgtg

SEQ ID NO: 44179 - DNA, 16 bp, synthetic construct
  misc_feature 1..16: note = synthetic [barcode part1]
  source 1..16: mol_type = other DNA
tcctggtgtacttaac

SEQ ID NO: 44180 - DNA, 16 bp, synthetic construct
  misc_feature 1..16: note = synthetic [barcode part1]
  source 1..16: mol_type = other DNA
tgcgtagttacgcagt

SEQ ID NO: 44181 - DNA, 16 bp, synthetic construct
  misc_feature 1..16: note = synthetic [barcode part1]
  source 1..16: mol_type = other DNA
tcggtattcaattccg

SEQ ID NO: 44182 - DNA, 16 bp, synthetic construct
  misc_feature 1..16: note = synthetic [barcode part1]
  source 1..16: mol_type = other DNA
ttggacaatctcgttc

SEQ ID NO: 44183 - DNA, 16 bp, synthetic construct
  misc_feature 1..16: note = synthetic [barcode part1]
  source 1..16: mol_type = other DNA
ccagattaccgagttg

SEQ ID NO: 44184 - DNA, 16 bp, synthetic construct
  misc_feature 1..16: note = synthetic [barcode part1]
  source 1..16: mol_type = other DNA
gtacgtacgtacgtac

SEQ ID NO: 44185 - DNA, 16 bp, synthetic construct
  misc_feature 1..16: note = synthetic [barcode part1]
  source 1..16: mol_type = other DNA
cggcactaacaggtag

SEQ ID NO: 44186 - DNA, 16 bp, synthetic construct
  misc_feature 1..16: note = synthetic [barcode part1]
  source 1..16: mol_type = other DNA
cagatacgaagtggcc

SEQ ID NO: 44187 - DNA, 16 bp, synthetic construct
  misc_feature 1..16: note = synthetic [barcode part1]
  source 1..16: mol_type = other DNA
gttgtctggtgaggtt

SEQ ID NO: 44188 - DNA, 16 bp, synthetic construct
  misc_feature 1..16: note = synthetic [barcode part1]
  source 1..16: mol_type = other DNA
atcggtgcggaaggtt

SEQ ID NO: 44189 - DNA, 16 bp, synthetic construct
  misc_feature 1..16: note = synthetic [barcode part1]
  source 1..16: mol_type = other DNA
acaacctctacgtccg

SEQ ID NO: 44190 - DNA, 16 bp, synthetic construct
  misc_feature 1..16: note = synthetic [barcode part1]
  source 1..16: mol_type = other DNA
tggcgtgattgaggac

SEQ ID NO: 44191 - DNA, 16 bp, synthetic construct
  misc_feature 1..16: note = synthetic [barcode part1]
  source 1..16: mol_type = other DNA
agtctgtgtctacgag

SEQ ID NO: 44192 - DNA, 16 bp, synthetic construct
  misc_feature 1..16: note = synthetic [barcode part1]
  source 1..16: mol_type = other DNA
gaaccgttatcttcgt

SEQ ID NO: 44193 - DNA, 16 bp, synthetic construct
  misc_feature 1..16: note = synthetic [barcode part1]
  source 1..16: mol_type = other DNA
acacacgtagtaccgt

SEQ ID NO: 44194 - DNA, 16 bp, synthetic construct
  misc_feature 1..16: note = synthetic [barcode part1]
  source 1..16: mol_type = other DNA
gagagatcttgcaagt

SEQ ID NO: 44195 - DNA, 16 bp, synthetic construct
  misc_feature 1..16: note = synthetic [barcode part1]
  source 1..16: mol_type = other DNA
cgtcaagagtgactct

SEQ ID NO: 44196 - DNA, 16 bp, synthetic construct
  misc_feature 1..16: note = synthetic [barcode part1]
  source 1..16: mol_type = other DNA
tcgatcctcgtgtgac

SEQ ID NO: 44197 - DNA, 16 bp, synthetic construct
  misc_feature 1..16: note = synthetic [barcode part1]
  source 1..16: mol_type = other DNA
tcacgagtaagtccgt

SEQ ID NO: 44198 - DNA, 16 bp, synthetic construct
  misc_feature 1..16: note = synthetic [barcode part1]
  source 1..16: mol_type = other DNA
ttgcacctgagttatc

SEQ ID NO: 44199 - DNA, 16 bp, synthetic construct
  misc_feature 1..16: note = synthetic [barcode part1]
  source 1..16: mol_type = other DNA
ataaggaggaagtgcc

SEQ ID NO: 44200 - DNA, 16 bp, synthetic construct
  misc_feature 1..16: note = synthetic [barcode part1]
  source 1..16: mol_type = other DNA
agttccttgtaggtct

SEQ ID NO: 44201 - DNA, 16 bp, synthetic construct
  misc_feature 1..16: note = synthetic [barcode part1]
  source 1..16: mol_type = other DNA
cgtgtcgaatcggaag

SEQ ID NO: 44202 - DNA, 16 bp, synthetic construct
  misc_feature 1..16: note = synthetic [barcode part1]
  source 1..16: mol_type = other DNA
agttcacgtaacagag

SEQ ID NO: 44203 - DNA, 16 bp, synthetic construct
  misc_feature 1..16: note = synthetic [barcode part1]
  source 1..16: mol_type = other DNA
gcaatcttggatcacg

SEQ ID NO: 44204 - DNA, 16 bp, synthetic construct
  misc_feature 1..16: note = synthetic [barcode part1]
  source 1..16: mol_type = other DNA
gacggttcaacagtct

SEQ ID NO: 44205 - DNA, 16 bp, synthetic construct
  misc_feature 1..16: note = synthetic [barcode part1]
  source 1..16: mol_type = other DNA
ttgaacgccgtcctac

SEQ ID NO: 44206 - DNA, 16 bp, synthetic construct
  misc_feature 1..16: note = synthetic [barcode part1]
  source 1..16: mol_type = other DNA
tctaaggattgaccgc

SEQ ID NO: 44207 - DNA, 16 bp, synthetic construct
  misc_feature 1..16: note = synthetic [barcode part1]
  source 1..16: mol_type = other DNA
actatcgcctctgcag

SEQ ID NO: 44208 - DNA, 16 bp, synthetic construct
  misc_feature 1..16: note = synthetic [barcode part1]
  source 1..16: mol_type = other DNA
gtaggaactggtagtt

SEQ ID NO: 44209 - DNA, 16 bp, synthetic construct
  misc_feature 1..16: note = synthetic [barcode part1]
  source 1..16: mol_type = other DNA
gcacagttgactgtgt

SEQ ID NO: 44210 - DNA, 16 bp, synthetic construct
  misc_feature 1..16: note = synthetic [barcode part1]
  source 1..16: mol_type = other DNA
aactctccggtagagt

SEQ ID NO: 44211 - DNA, 16 bp, synthetic construct
  misc_feature 1..16: note = synthetic [barcode part1]
  source 1..16: mol_type = other DNA
ccacaaggaacgttct

SEQ ID NO: 44212 - DNA, 16 bp, synthetic construct
  misc_feature 1..16: note = synthetic [barcode part1]
  source 1..16: mol_type = other DNA
taagtcgatcactggc

SEQ ID NO: 44213 - DNA, 16 bp, synthetic construct
  misc_feature 1..16: note = synthetic [barcode part1]
  source 1..16: mol_type = other DNA
acagacgcggaacttg

SEQ ID NO: 44214 - DNA, 16 bp, synthetic construct
  misc_feature 1..16: note = synthetic [barcode part1]
  source 1..16: mol_type = other DNA
cgaacgaaggtcctag

SEQ ID NO: 44215 - DNA, 16 bp, synthetic construct
  misc_feature 1..16: note = synthetic [barcode part1]
  source 1..16: mol_type = other DNA
gtggaacgtgagttcg

SEQ ID NO: 44216 - DNA, 16 bp, synthetic construct
  misc_feature 1..16: note = synthetic [barcode part1]
  source 1..16: mol_type = other DNA
tgccgttacggaatac

SEQ ID NO: 44217 - DNA, 16 bp, synthetic construct
  misc_feature 1..16: note = synthetic [barcode part1]
  source 1..16: mol_type = other DNA
acgcaaccacaatcgt

SEQ ID NO: 44218 - DNA, 16 bp, synthetic construct
  misc_feature 1..16: note = synthetic [barcode part1]
  source 1..16: mol_type = other DNA
cagttaggccagttac

SEQ ID NO: 44219 - DNA, 16 bp, synthetic construct
  misc_feature 1..16: note = synthetic [barcode part1]
  source 1..16: mol_type = other DNA
aggacactgtgtcttg

SEQ ID NO: 44220 - DNA, 16 bp, synthetic construct
  misc_feature 1..16: note = synthetic [barcode part1]
  source 1..16: mol_type = other DNA
tgccgtctaggtctgt

SEQ ID NO: 44221 - DNA, 16 bp, synthetic construct
  misc_feature 1..16: note = synthetic [barcode part1]
  source 1..16: mol_type = other DNA
tcgtcctactaaggag

SEQ ID NO: 44222 - DNA, 16 bp, synthetic construct
  misc_feature 1..16: note = synthetic [barcode part1]
  source 1..16: mol_type = other DNA
taatcgcggatcggag

SEQ ID NO: 44223 - DNA, 16 bp, synthetic construct
  misc_feature 1..16: note = synthetic [barcode part1]
  source 1..16: mol_type = other DNA
gtcacttaggtctact

SEQ ID NO: 44224 - DNA, 16 bp, synthetic construct
  misc_feature 1..16: note = synthetic [barcode part1]
  source 1..16: mol_type = other DNA
agatagtcgtgaatcg

SEQ ID NO: 44225 - DNA, 16 bp, synthetic construct
  misc_feature 1..16: note = synthetic [barcode part1]
  source 1..16: mol_type = other DNA
gttcttactgcgttcc

SEQ ID NO: 44226 - DNA, 16 bp, synthetic construct
  misc_feature 1..16: note = synthetic [barcode part1]
  source 1..16: mol_type = other DNA
gcgaccaatatcaacc

SEQ ID NO: 44227 - DNA, 16 bp, synthetic construct
  misc_feature 1..16: note = synthetic [barcode part1]
  source 1..16: mol_type = other DNA
gactaggacttggacg

SEQ ID NO: 44228 - DNA, 16 bp, synthetic construct
  misc_feature 1..16: note = synthetic [barcode part1]
  source 1..16: mol_type = other DNA
tggccacgaactagag

SEQ ID NO: 44229 - DNA, 16 bp, synthetic construct
  misc_feature 1..16: note = synthetic [barcode part1]
  source 1..16: mol_type = other DNA
gtgaatcgcacagttc

SEQ ID NO: 44230 - DNA, 16 bp, synthetic construct
  misc_feature 1..16: note = synthetic [barcode part1]
  source 1..16: mol_type = other DNA
cgcgtaagttcagact

SEQ ID NO: 44231 - DNA, 16 bp, synthetic construct
  misc_feature 1..16: note = synthetic [barcode part1]
  source 1..16: mol_type = other DNA
cactaggacttggtgt

SEQ ID NO: 44232 - DNA, 16 bp, synthetic construct
  misc_feature 1..16: note = synthetic [barcode part1]
  source 1..16: mol_type = other DNA
taaccgtagaccggag

SEQ ID NO: 44233 - DNA, 16 bp, synthetic construct
  misc_feature 1..16: note = synthetic [barcode part1]
  source 1..16: mol_type = other DNA
gaaggtgtagaccacc

SEQ ID NO: 44234 - DNA, 16 bp, synthetic construct
  misc_feature 1..16: note = synthetic [barcode part1]
  source 1..16: mol_type = other DNA
atccaaccgatccaag

SEQ ID NO: 44235 - DNA, 16 bp, synthetic construct
  misc_feature 1..16: note = synthetic [barcode part1]
  source 1..16: mol_type = other DNA
cggatcagaagatact

SEQ ID NO: 44236 - DNA, 16 bp, synthetic construct
  misc_feature 1..16: note = synthetic [barcode part1]
  source 1..16: mol_type = other DNA
agattcggcagttacc

SEQ ID NO: 44237 - DNA, 16 bp, synthetic construct
  misc_feature 1..16: note = synthetic [barcode part1]
  source 1..16: mol_type = other DNA
cacagattgtccgaac

SEQ ID NO: 44238 - DNA, 16 bp, synthetic construct
  misc_feature 1..16: note = synthetic [barcode part1]
  source 1..16: mol_type = other DNA
accggaaccttaatcg

SEQ ID NO: 44239 - DNA, 16 bp, synthetic construct
  misc_feature 1..16: note = synthetic [barcode part1]
  source 1..16: mol_type = other DNA
tactacgatcgaccag

SEQ ID NO: 44240 - DNA, 16 bp, synthetic construct
  misc_feature 1..16: note = synthetic [barcode part1]
  source 1..16: mol_type = other DNA
gcagtgtcagtgttgt

SEQ ID NO: 44241 - DNA, 16 bp, synthetic construct
  misc_feature 1..16: note = synthetic [barcode part1]
  source 1..16: mol_type = other DNA
ttgtgtgaccagtgtg

SEQ ID NO: 44242 - DNA, 16 bp, synthetic construct
  misc_feature 1..16: note = synthetic [barcode part1]
  source 1..16: mol_type = other DNA
caacttgtcacacttg

SEQ ID NO: 44243 - DNA, 16 bp, synthetic construct
  misc_feature 1..16: note = synthetic [barcode part1]
  source 1..16: mol_type = other DNA
ccttacgtggtccaac

SEQ ID NO: 44244 - DNA, 16 bp, synthetic construct
  misc_feature 1..16: note = synthetic [barcode part1]
  source 1..16: mol_type = other DNA
tctcagtatcgcctct

SEQ ID NO: 44245 - DNA, 16 bp, synthetic construct
  misc_feature 1..16: note = synthetic [barcode part1]
  source 1..16: mol_type = other DNA
tgttcgtactcgtcct

SEQ ID NO: 44246 - DNA, 16 bp, synthetic construct
  misc_feature 1..16: note = synthetic [barcode part1]
  source 1..16: mol_type = other DNA
actcgtcaatactgtc

SEQ ID NO: 44247 - DNA, 16 bp, synthetic construct
  misc_feature 1..16: note = synthetic [barcode part1]
  source 1..16: mol_type = other DNA
gaattccgtcgactag

SEQ ID NO: 44248 - DNA, 16 bp, synthetic construct
  misc_feature 1..16: note = synthetic [barcode part1]
  source 1..16: mol_type = other DNA
ataggtcgccacttcc

SEQ ID NO: 44249 - DNA, 16 bp, synthetic construct
  misc_feature 1..16: note = synthetic [barcode part1]
  source 1..16: mol_type = other DNA
aggaaccgaggaattg

SEQ ID NO: 44250 - DNA, 16 bp, synthetic construct
  misc_feature 1..16: note = synthetic [barcode part1]
  source 1..16: mol_type = other DNA
tggtaacaggacgtgc

SEQ ID NO: 44251 - DNA, 16 bp, synthetic construct
  misc_feature 1..16: note = synthetic [barcode part1]
  source 1..16: mol_type = other DNA
attcgacgaccactag

SEQ ID NO: 44252 - DNA, 16 bp, synthetic construct
  misc_feature 1..16: note = synthetic [barcode part1]
  source 1..16: mol_type = other DNA
gagtgttattcacggc

SEQ ID NO: 44253 - DNA, 16 bp, synthetic construct
  misc_feature 1..16: note = synthetic [barcode part1]
  source 1..16: mol_type = other DNA
gtcggtaagtgacggt

SEQ ID NO: 44254 - DNA, 16 bp, synthetic construct
  misc_feature 1..16: note = synthetic [barcode part1]
  source 1..16: mol_type = other DNA
atcggtggcgattgtt

SEQ ID NO: 44255 - DNA, 16 bp, synthetic construct
  misc_feature 1..16: note = synthetic [barcode part1]
  source 1..16: mol_type = other DNA
taaggaggtaccaact

SEQ ID NO: 44256 - DNA, 16 bp, synthetic construct
  misc_feature 1..16: note = synthetic [barcode part1]
  source 1..16: mol_type = other DNA
aactgaactaccaccg

SEQ ID NO: 44257 - DNA, 16 bp, synthetic construct
  misc_feature 1..16: note = synthetic [barcode part1]
  source 1..16: mol_type = other DNA
tgcgcaatacttcgtt

SEQ ID NO: 44258 - DNA, 16 bp, synthetic construct
  misc_feature 1..16: note = synthetic [barcode part1]
  source 1..16: mol_type = other DNA
tcgacagagtgatcct

SEQ ID NO: 44259 - DNA, 16 bp, synthetic construct
  misc_feature 1..16: note = synthetic [barcode part1]
  source 1..16: mol_type = other DNA
cgtagacggcgagatt

SEQ ID NO: 44260 - DNA, 16 bp, synthetic construct
  misc_feature 1..16: note = synthetic [barcode part1]
  source 1..16: mol_type = other DNA
gtacgtacaactgacc

SEQ ID NO: 44261 - DNA, 16 bp, synthetic construct
  misc_feature 1..16: note = synthetic [barcode part1]
  source 1..16: mol_type = other DNA
acacaacaaccttctc

SEQ ID NO: 44262 - DNA, 16 bp, synthetic construct
  misc_feature 1..16: note = synthetic [barcode part1]
  source 1..16: mol_type = other DNA
atatatcgcaaggcag

SEQ ID NO: 44263 - DNA, 16 bp, synthetic construct
  misc_feature 1..16: note = synthetic [barcode part1]
  source 1..16: mol_type = other DNA
tccagaactagttggc

SEQ ID NO: 44264 - DNA, 16 bp, synthetic construct
  misc_feature 1..16: note = synthetic [barcode part1]
  source 1..16: mol_type = other DNA
acgccttccagatcac

SEQ ID NO: 44265 - DNA, 16 bp, synthetic construct
  misc_feature 1..16: note = synthetic [barcode part1]
  source 1..16: mol_type = other DNA
aatacgtcggcgtgtt

SEQ ID NO: 44266 - DNA, 16 bp, synthetic construct
  misc_feature 1..16: note = synthetic [barcode part1]
  source 1..16: mol_type = other DNA
gagtaggcaaggttcc

SEQ ID NO: 44267 - DNA, 16 bp, synthetic construct
  misc_feature 1..16: note = synthetic [barcode part1]
  source 1..16: mol_type = other DNA
tgtaagtccgcctcgt

SEQ ID NO: 44268 - DNA, 16 bp, synthetic construct
  misc_feature 1..16: note = synthetic [barcode part1]
  source 1..16: mol_type = other DNA
gcgccttccagattgt

SEQ ID NO: 44269 - DNA, 16 bp, synthetic construct
  misc_feature 1..16: note = synthetic [barcode part1]
  source 1..16: mol_type = other DNA
aggttaacgatacacg

SEQ ID NO: 44270 - DNA, 16 bp, synthetic construct
  misc_feature 1..16: note = synthetic [barcode part1]
  source 1..16: mol_type = other DNA
tctccttagagtctcc

SEQ ID NO: 44271 - DNA, 16 bp, synthetic construct
  misc_feature 1..16: note = synthetic [barcode part1]
  source 1..16: mol_type = other DNA
ataacgccggttaacc

SEQ ID NO: 44272 - DNA, 16 bp, synthetic construct
  misc_feature 1..16: note = synthetic [barcode part1]
  source 1..16: mol_type = other DNA
gagttcacgaactcac

SEQ ID NO: 44273 - DNA, 16 bp, synthetic construct
  misc_feature 1..16: note = synthetic [barcode part1]
  source 1..16: mol_type = other DNA
cgcctgtcctagagtt

SEQ ID NO: 44274 - DNA, 16 bp, synthetic construct
  misc_feature 1..16: note = synthetic [barcode part1]
  source 1..16: mol_type = other DNA
agtctctcgcagacct

SEQ ID NO: 44275 - DNA, 16 bp, synthetic construct
  misc_feature 1..16: note = synthetic [barcode part1]
  source 1..16: mol_type = other DNA
cctactggtgtctgac

SEQ ID NO: 44276 - DNA, 16 bp, synthetic construct
  misc_feature 1..16: note = synthetic [barcode part1]
  source 1..16: mol_type = other DNA
tcacagaataaggcac

SEQ ID NO: 44277 - DNA, 16 bp, synthetic construct
  misc_feature 1..16: note = synthetic [barcode part1]
  source 1..16: mol_type = other DNA
cgacaattccttgcgc

SEQ ID NO: 44278 - DNA, 16 bp, synthetic construct
  misc_feature 1..16: note = synthetic [barcode part1]
  source 1..16: mol_type = other DNA
actcaccttacggtgc

SEQ ID NO: 44279 - DNA, 16 bp, synthetic construct
  misc_feature 1..16: note = synthetic [barcode part1]
  source 1..16: mol_type = other DNA
tactggtccggtcttg

SEQ ID NO: 44280 - DNA, 16 bp, synthetic construct
  misc_feature 1..16: note = synthetic [barcode part1]
  source 1..16: mol_type = other DNA
tgcaactctggatacg

SEQ ID NO: 44281 - DNA, 16 bp, synthetic construct
  misc_feature 1..16: note = synthetic [barcode part1]
  source 1..16: mol_type = other DNA
gcactcttaacgattc

SEQ ID NO: 44282 - DNA, 16 bp, synthetic construct
  misc_feature 1..16: note = synthetic [barcode part1]
  source 1..16: mol_type = other DNA
ttggcgagttcttgtt

SEQ ID NO: 44283 - DNA, 16 bp, synthetic construct
  misc_feature 1..16: note = synthetic [barcode part1]
  source 1..16: mol_type = other DNA
gtgtcctgacctagtc

SEQ ID NO: 44284 - DNA, 16 bp, synthetic construct
  misc_feature 1..16: note = synthetic [barcode part1]
  source 1..16: mol_type = other DNA
gaaggtgtattagacc

SEQ ID NO: 44285 - DNA, 16 bp, synthetic construct
  misc_feature 1..16: note = synthetic [barcode part1]
  source 1..16: mol_type = other DNA
ataatctccacgttcg

SEQ ID NO: 44286 - DNA, 16 bp, synthetic construct
  misc_feature 1..16: note = synthetic [barcode part1]
  source 1..16: mol_type = other DNA
cgacctgaggtgtaag

SEQ ID NO: 44287 - DNA, 16 bp, synthetic construct
  misc_feature 1..16: note = synthetic [barcode part1]
  source 1..16: mol_type = other DNA
gtcttgtgtccaagtt

SEQ ID NO: 44288 - DNA, 16 bp, synthetic construct
  misc_feature 1..16: note = synthetic [barcode part1]
  source 1..16: mol_type = other DNA
tacgttcgcaggaact

SEQ ID NO: 44289 - DNA, 16 bp, synthetic construct
  misc_feature 1..16: note = synthetic [barcode part1]
  source 1..16: mol_type = other DNA
gattcgtacctcgtcg

SEQ ID NO: 44290 - DNA, 16 bp, synthetic construct
  misc_feature 1..16: note = synthetic [barcode part1]
  source 1..16: mol_type = other DNA
gcgtaagtctggtgag

SEQ ID NO: 44291 - DNA, 16 bp, synthetic construct
  misc_feature 1..16: note = synthetic [barcode part1]
  source 1..16: mol_type = other DNA
tgaaccgtcggcaatt

SEQ ID NO: 44292 - DNA, 16 bp, synthetic construct
  misc_feature 1..16: note = synthetic [barcode part1]
  source 1..16: mol_type = other DNA
ttgaggcaggcaggtt

SEQ ID NO: 44293 - DNA, 16 bp, synthetic construct
  misc_feature 1..16: note = synthetic [barcode part1]
  source 1..16: mol_type = other DNA
tgtggagaattcggcg

SEQ ID NO: 44294 - DNA, 16 bp, synthetic construct
  misc_feature 1..16: note = synthetic [barcode part1]
  source 1..16: mol_type = other DNA
caagatctgtgcgtac

SEQ ID NO: 44295 - DNA, 16 bp, synthetic construct
  misc_feature 1..16: note = synthetic [barcode part1]
  source 1..16: mol_type = other DNA
aatctccggccacact

SEQ ID NO: 44296 - DNA, 16 bp, synthetic construct
  misc_feature 1..16: note = synthetic [barcode part1]
  source 1..16: mol_type = other DNA
aagtaactgcgccgag

SEQ ID NO: 44297 - DNA, 16 bp, synthetic construct
  misc_feature 1..16: note = synthetic [barcode part1]
  source 1..16: mol_type = other DNA
gttggtgtccaatctt

SEQ ID NO: 44298 - DNA, 16 bp, synthetic construct
  misc_feature 1..16: note = synthetic [barcode part1]
  source 1..16: mol_type = other DNA
actctgattctctccg

SEQ ID NO: 44299 - DNA, 16 bp, synthetic construct
  misc_feature 1..16: note = synthetic [barcode part1]
  source 1..16: mol_type = other DNA
cggtgtctcacaatag

SEQ ID NO: 44300 - DNA, 16 bp, synthetic construct
  misc_feature 1..16: note = synthetic [barcode part1]
  source 1..16: mol_type = other DNA
gaatcacacctctgcc

SEQ ID NO: 44301 - DNA, 16 bp, synthetic construct
  misc_feature 1..16: note = synthetic [barcode part1]
  source 1..16: mol_type = other DNA
ttccgcgtataggagt

SEQ ID NO: 44302 - DNA, 16 bp, synthetic construct
  misc_feature 1..16: note = synthetic [barcode part1]
  source 1..16: mol_type = other DNA
gcactagactggaggt

SEQ ID NO: 44303 - DNA, 16 bp, synthetic construct
  misc_feature 1..16: note = synthetic [barcode part1]
  source 1..16: mol_type = other DNA
gacttggcgatagtct

SEQ ID NO: 44304 - DNA, 16 bp, synthetic construct
  misc_feature 1..16: note = synthetic [barcode part1]
  source 1..16: mol_type = other DNA
tgtgtgtacacgtgtg

SEQ ID NO: 44305 - DNA, 16 bp, synthetic construct
  misc_feature 1..16: note = synthetic [barcode part1]
  source 1..16: mol_type = other DNA
gacgagatcaacgtgc

SEQ ID NO: 44306 - DNA, 16 bp, synthetic construct
  misc_feature 1..16: note = synthetic [barcode part1]
  source 1..16: mol_type = other DNA
gtactgtgacgttgtg

SEQ ID NO: 44307 - DNA, 16 bp, synthetic construct
  misc_feature 1..16: note = synthetic [barcode part1]
  source 1..16: mol_type = other DNA
ttggtccgagtgttcc

SEQ ID NO: 44308 - DNA, 16 bp, synthetic construct
  misc_feature 1..16: note = synthetic [barcode part1]
  source 1..16: mol_type = other DNA
tccgtgttgacttaac

SEQ ID NO: 44309 - DNA, 16 bp, synthetic construct
  misc_feature 1..16: note = synthetic [barcode part1]
  source 1..16: mol_type = other DNA
taacggtacgcctctc

SEQ ID NO: 44310 - DNA, 16 bp, synthetic construct
  misc_feature 1..16: note = synthetic [barcode part1]
  source 1..16: mol_type = other DNA
tcgccacctataagtt

SEQ ID NO: 44311 - DNA, 16 bp, synthetic construct
  misc_feature 1..16: note = synthetic [barcode part1]
  source 1..16: mol_type = other DNA
cagaccaatcgtcagt

SEQ ID NO: 44312 - DNA, 16 bp, synthetic construct
  misc_feature 1..16: note = synthetic [barcode part1]
  source 1..16: mol_type = other DNA
tgccggaagattatcc

SEQ ID NO: 44313 - DNA, 16 bp, synthetic construct
  misc_feature 1..16: note = synthetic [barcode part1]
  source 1..16: mol_type = other DNA
tcgaggagattgcacg

SEQ ID NO: 44314 - DNA, 16 bp, synthetic construct
  misc_feature 1..16: note = synthetic [barcode part1]
  source 1..16: mol_type = other DNA
gaaggcacacttctac

SEQ ID NO: 44315 - DNA, 16 bp, synthetic construct
  misc_feature 1..16: note = synthetic [barcode part1]
  source 1..16: mol_type = other DNA
gttagattgtctccgt

SEQ ID NO: 44316 - DNA, 16 bp, synthetic construct
  misc_feature 1..16: note = synthetic [barcode part1]
  source 1..16: mol_type = other DNA
ccttcagtgtggttgc

SEQ ID NO: 44317 - DNA, 16 bp, synthetic construct
  misc_feature 1..16: note = synthetic [barcode part1]
  source 1..16: mol_type = other DNA
tgtgcgacttgattct

SEQ ID NO: 44318 - DNA, 16 bp, synthetic construct
  misc_feature 1..16: note = synthetic [barcode part1]
  source 1..16: mol_type = other DNA
agaagtgtgccagatt

SEQ ID NO: 44319 - DNA, 16 bp, synthetic construct
  misc_feature 1..16: note = synthetic [barcode part1]
  source 1..16: mol_type = other DNA
tctaagaggaggaggt

SEQ ID NO: 44320 - DNA, 16 bp, synthetic construct
  misc_feature 1..16: note = synthetic [barcode part1]
  source 1..16: mol_type = other DNA
gttggactcgtgcctt

SEQ ID NO: 44321 - DNA, 16 bp, synthetic construct
  misc_feature 1..16: note = synthetic [barcode part1]
  source 1..16: mol_type = other DNA
tctattgtggcggaac

SEQ ID NO: 44322 - DNA, 16 bp, synthetic construct
  misc_feature 1..16: note = synthetic [barcode part1]
  source 1..16: mol_type = other DNA
gtcacttgtccgtggt

SEQ ID NO: 44323 - DNA, 16 bp, synthetic construct
  misc_feature 1..16: note = synthetic [barcode part1]
  source 1..16: mol_type = other DNA
gacacgtaccaacgtt

SEQ ID NO: 44324 - DNA, 16 bp, synthetic construct
  misc_feature 1..16: note = synthetic [barcode part1]
  source 1..16: mol_type = other DNA
agttgtacgcagtcgt

SEQ ID NO: 44325 - DNA, 16 bp, synthetic construct
  misc_feature 1..16: note = synthetic [barcode part1]
  source 1..16: mol_type = other DNA
acagacggtaacgtcg

SEQ ID NO: 44326 - DNA, 16 bp, synthetic construct
  misc_feature 1..16: note = synthetic [barcode part1]
  source 1..16: mol_type = other DNA
ccttatagacttggtc

SEQ ID NO: 44327 - DNA, 16 bp, synthetic construct
  misc_feature 1..16: note = synthetic [barcode part1]
  source 1..16: mol_type = other DNA
cgtgcactgatactag

SEQ ID NO: 44328 - DNA, 16 bp, synthetic construct
  misc_feature 1..16: note = synthetic [barcode part1]
  source 1..16: mol_type = other DNA
acgaatattcaggacg

SEQ ID NO: 44329 - DNA, 16 bp, synthetic construct
  misc_feature 1..16: note = synthetic [barcode part1]
  source 1..16: mol_type = other DNA
caacgtagaggtgacc

SEQ ID NO: 44330 - DNA, 16 bp, synthetic construct
  misc_feature 1..16: note = synthetic [barcode part1]
  source 1..16: mol_type = other DNA
gccgaataagttgcct

SEQ ID NO: 44331 - DNA, 16 bp, synthetic construct
  misc_feature 1..16: note = synthetic [barcode part1]
  source 1..16: mol_type = other DNA
tagaagacctcttggc

SEQ ID NO: 44332 - DNA, 16 bp, synthetic construct
  misc_feature 1..16: note = synthetic [barcode part1]
  source 1..16: mol_type = other DNA
tggatcgtgacgactt

SEQ ID NO: 44333 - DNA, 16 bp, synthetic construct
  misc_feature 1..16: note = synthetic [barcode part1]
  source 1..16: mol_type = other DNA
gacagtgacagactcg

SEQ ID NO: 44334 - DNA, 16 bp, synthetic construct
  misc_feature 1..16: note = synthetic [barcode part1]
  source 1..16: mol_type = other DNA
tgattcgagtacgaag

SEQ ID NO: 44335 - DNA, 16 bp, synthetic construct
  misc_feature 1..16: note = synthetic [barcode part1]
  source 1..16: mol_type = other DNA
atccttaagtgacctc

SEQ ID NO: 44336 - DNA, 16 bp, synthetic construct
  misc_feature 1..16: note = synthetic [barcode part1]
  source 1..16: mol_type = other DNA
ccgcgtaggttagaag

SEQ ID NO: 44337 - DNA, 16 bp, synthetic construct
  misc_feature 1..16: note = synthetic [barcode part1]
  source 1..16: mol_type = other DNA
tgcaccgttccaatcg

SEQ ID NO: 44338 - DNA, 16 bp, synthetic construct
  misc_feature 1..16: note = synthetic [barcode part1]
  source 1..16: mol_type = other DNA
gatctctgcacaactt

SEQ ID NO: 44339 - DNA, 16 bp, synthetic construct
  misc_feature 1..16: note = synthetic [barcode part1]
  source 1..16: mol_type = other DNA
ccactcaagtactatc

SEQ ID NO: 44340 - DNA, 16 bp, synthetic construct
  misc_feature 1..16: note = synthetic [barcode part1]
  source 1..16: mol_type = other DNA
tctctaagaccaggac

SEQ ID NO: 44341 - DNA, 16 bp, synthetic construct
  misc_feature 1..16: note = synthetic [barcode part1]
  source 1..16: mol_type = other DNA
gattattacctctgcg

SEQ ID NO: 44342 - DNA, 16 bp, synthetic construct
  misc_feature 1..16: note = synthetic [barcode part1]
  source 1..16: mol_type = other DNA
caagtcaatcgagtcc

SEQ ID NO: 44343 - DNA, 16 bp, synthetic construct
  misc_feature 1..16: note = synthetic [barcode part1]
  source 1..16: mol_type = other DNA
agtcttgacctacttg

SEQ ID NO: 44344 - DNA, 16 bp, synthetic construct
  misc_feature 1..16: note = synthetic [barcode part1]
  source 1..16: mol_type = other DNA
cggaagatatacgatc

SEQ ID NO: 44345 - DNA, 16 bp, synthetic construct
  misc_feature 1..16: note = synthetic [barcode part1]
  source 1..16: mol_type = other DNA
caccgaacctgatagt

SEQ ID NO: 44346 - DNA, 16 bp, synthetic construct
  misc_feature 1..16: note = synthetic [barcode part1]
  source 1..16: mol_type = other DNA
ccacgaacttagtctt

SEQ ID NO: 44347 - DNA, 16 bp, synthetic construct
  misc_feature 1..16: note = synthetic [barcode part1]
  source 1..16: mol_type = other DNA
acgtaggatcttcacg

SEQ ID NO: 44348 - DNA, 16 bp, synthetic construct
  misc_feature 1..16: note = synthetic [barcode part1]
  source 1..16: mol_type = other DNA
acacaactgtgactgc

SEQ ID NO: 44349 - DNA, 16 bp, synthetic construct
  misc_feature 1..16: note = synthetic [barcode part1]
  source 1..16: mol_type = other DNA
gattcacctgtcttag

SEQ ID NO: 44350 - DNA, 16 bp, synthetic construct
  misc_feature 1..16: note = synthetic [barcode part1]
  source 1..16: mol_type = other DNA
atattgatcggacgcc

SEQ ID NO: 44351 - DNA, 16 bp, synthetic construct
  misc_feature 1..16: note = synthetic [barcode part1]
  source 1..16: mol_type = other DNA
atagtcgttcctcggc

SEQ ID NO: 44352 - DNA, 16 bp, synthetic construct
  misc_feature 1..16: note = synthetic [barcode part1]
  source 1..16: mol_type = other DNA
acactccgatcgtcac

SEQ ID NO: 44353 - DNA, 16 bp, synthetic construct
  misc_feature 1..16: note = synthetic [barcode part1]
  source 1..16: mol_type = other DNA
cctgatcaccacgtac

SEQ ID NO: 44354 - DNA, 16 bp, synthetic construct
  misc_feature 1..16: note = synthetic [barcode part1]
  source 1..16: mol_type = other DNA
tcgccacttacttcgt

SEQ ID NO: 44355 - DNA, 16 bp, synthetic construct
  misc_feature 1..16: note = synthetic [barcode part1]
  source 1..16: mol_type = other DNA
tcttccgattcggacg

SEQ ID NO: 44356 - DNA, 16 bp, synthetic construct
  misc_feature 1..16: note = synthetic [barcode part1]
  source 1..16: mol_type = other DNA
attcggaacctcgtcc

SEQ ID NO: 44357 - DNA, 16 bp, synthetic construct
  misc_feature 1..16: note = synthetic [barcode part1]
  source 1..16: mol_type = other DNA
cgtcgaagaactacct

SEQ ID NO: 44358 - DNA, 16 bp, synthetic construct
  misc_feature 1..16: note = synthetic [barcode part1]
  source 1..16: mol_type = other DNA
ttgactccaggtccgt

SEQ ID NO: 44359 - DNA, 16 bp, synthetic construct
  misc_feature 1..16: note = synthetic [barcode part1]
  source 1..16: mol_type = other DNA
ttccgcgaattatcgt

SEQ ID NO: 44360 - DNA, 16 bp, synthetic construct
  misc_feature 1..16: note = synthetic [barcode part1]
  source 1..16: mol_type = other DNA
tcttgagttgtctacg

SEQ ID NO: 44361 - DNA, 16 bp, synthetic construct
  misc_feature 1..16: note = synthetic [barcode part1]
  source 1..16: mol_type = other DNA
caccgactagtatacg

SEQ ID NO: 44362 - DNA, 16 bp, synthetic construct
  misc_feature 1..16: note = synthetic [barcode part1]
  source 1..16: mol_type = other DNA
acgttggttctcagtt

SEQ ID NO: 44363 - DNA, 16 bp, synthetic construct
  misc_feature 1..16: note = synthetic [barcode part1]
  source 1..16: mol_type = other DNA
gtaactcttgcacttg

SEQ ID NO: 44364 - DNA, 16 bp, synthetic construct
  misc_feature 1..16: note = synthetic [barcode part1]
  source 1..16: mol_type = other DNA
acagtactgcaacacc

SEQ ID NO: 44365 - DNA, 16 bp, synthetic construct
  misc_feature 1..16: note = synthetic [barcode part1]
  source 1..16: mol_type = other DNA
actagtaaggcgtcct

SEQ ID NO: 44366 - DNA, 16 bp, synthetic construct
  misc_feature 1..16: note = synthetic [barcode part1]
  source 1..16: mol_type = other DNA
gaagtctcgcctgttc

SEQ ID NO: 44367 - DNA, 16 bp, synthetic construct
  misc_feature 1..16: note = synthetic [barcode part1]
  source 1..16: mol_type = other DNA
ccaattgtagtcgacg

SEQ ID NO: 44368 - DNA, 16 bp, synthetic construct
  misc_feature 1..16: note = synthetic [barcode part1]
  source 1..16: mol_type = other DNA
tctatcttaggactcg

SEQ ID NO: 44369 - DNA, 16 bp, synthetic construct
  misc_feature 1..16: note = synthetic [barcode part1]
  source 1..16: mol_type = other DNA
gagtgacgcgcaattg

SEQ ID NO: 44370 - DNA, 16 bp, synthetic construct
  misc_feature 1..16: note = synthetic [barcode part1]
  source 1..16: mol_type = other DNA
taactcgtgagttgcg

SEQ ID NO: 44371 - DNA, 16 bp, synthetic construct
  misc_feature 1..16: note = synthetic [barcode part1]
  source 1..16: mol_type = other DNA
acagaagaaggcgtgt

SEQ ID NO: 44372 - DNA, 16 bp, synthetic construct
  misc_feature 1..16: note = synthetic [barcode part1]
  source 1..16: mol_type = other DNA
tgactagtcagtcgac

SEQ ID NO: 44373 - DNA, 16 bp, synthetic construct
  misc_feature 1..16: note = synthetic [barcode part1]
  source 1..16: mol_type = other DNA
gattctggacgttgtg

SEQ ID NO: 44374 - DNA, 16 bp, synthetic construct
  misc_feature 1..16: note = synthetic [barcode part1]
  source 1..16: mol_type = other DNA
cggactcctgttctag

SEQ ID NO: 44375 - DNA, 16 bp, synthetic construct
  misc_feature 1..16: note = synthetic [barcode part1]
  source 1..16: mol_type = other DNA
cgaaccacgtaggagt

SEQ ID NO: 44376 - DNA, 16 bp, synthetic construct
  misc_feature 1..16: note = synthetic [barcode part1]
  source 1..16: mol_type = other DNA
aacagaggcgtggtct

SEQ ID NO: 44377 - DNA, 16 bp, synthetic construct
  misc_feature 1..16: note = synthetic [barcode part1]
  source 1..16: mol_type = other DNA
ttcaggacttcaggac

SEQ ID NO: 44378 - DNA, 16 bp, synthetic construct
  misc_feature 1..16: note = synthetic [barcode part1]
  source 1..16: mol_type = other DNA
gttggatacgacttgc

SEQ ID NO: 44379 - DNA, 16 bp, synthetic construct
  misc_feature 1..16: note = synthetic [barcode part1]
  source 1..16: mol_type = other DNA
caatacgactgcctcc

SEQ ID NO: 44380 - DNA, 16 bp, synthetic construct
  misc_feature 1..16: note = synthetic [barcode part1]
  source 1..16: mol_type = other DNA
tgttgtgactgtgacg

SEQ ID NO: 44381 - DNA, 16 bp, synthetic construct
  misc_feature 1..16: note = synthetic [barcode part1]
  source 1..16: mol_type = other DNA
acctaacgcactcctg

SEQ ID NO: 44382 - DNA, 16 bp, synthetic construct
  misc_feature 1..16: note = synthetic [barcode part1]
  source 1..16: mol_type = other DNA
tcaacttgagtcaggc

SEQ ID NO: 44383 - DNA, 16 bp, synthetic construct
  misc_feature 1..16: note = synthetic [barcode part1]
  source 1..16: mol_type = other DNA
agtgtatctggaaggt

SEQ ID NO: 44384 - DNA, 16 bp, synthetic construct
  misc_feature 1..16: note = synthetic [barcode part1]
  source 1..16: mol_type = other DNA
tagatccactctatcg

SEQ ID NO: 44385 - DNA, 16 bp, synthetic construct
  misc_feature 1..16: note = synthetic [barcode part1]
  source 1..16: mol_type = other DNA
gcacgatcgatacgtt

SEQ ID NO: 44386 - DNA, 16 bp, synthetic construct
  misc_feature 1..16: note = synthetic [barcode part1]
  source 1..16: mol_type = other DNA
tccgtatcggtgacct

SEQ ID NO: 44387 - DNA, 16 bp, synthetic construct
  misc_feature 1..16: note = synthetic [barcode part1]
  source 1..16: mol_type = other DNA
actccaaggagtcttg

SEQ ID NO: 44388 - DNA, 16 bp, synthetic construct
  misc_feature 1..16: note = synthetic [barcode part1]
  source 1..16: mol_type = other DNA
aagactcgaatctcgc

SEQ ID NO: 44389 - DNA, 16 bp, synthetic construct
  misc_feature 1..16: note = synthetic [barcode part1]
  source 1..16: mol_type = other DNA
tgcaagtaagtaacgc

SEQ ID NO: 44390 - DNA, 16 bp, synthetic construct
  misc_feature 1..16: note = synthetic [barcode part1]
  source 1..16: mol_type = other DNA
tggacgatcgcgatag

SEQ ID NO: 44391 - DNA, 16 bp, synthetic construct
  misc_feature 1..16: note = synthetic [barcode part1]
  source 1..16: mol_type = other DNA
tcgatacaacttcctg

SEQ ID NO: 44392 - DNA, 16 bp, synthetic construct
  misc_feature 1..16: note = synthetic [barcode part1]
  source 1..16: mol_type = other DNA
cgtgcggcgtcttatt

SEQ ID NO: 44393 - DNA, 16 bp, synthetic construct
  misc_feature 1..16: note = synthetic [barcode part1]
  source 1..16: mol_type = other DNA
acgagagatcagattc

SEQ ID NO: 44394 - DNA, 16 bp, synthetic construct
  misc_feature 1..16: note = synthetic [barcode part1]
  source 1..16: mol_type = other DNA
tatcttgcgagacgac

SEQ ID NO: 44395 - DNA, 16 bp, synthetic construct
  misc_feature 1..16: note = synthetic [barcode part1]
  source 1..16: mol_type = other DNA
tcttctagagtgtctg

SEQ ID NO: 44396 - DNA, 16 bp, synthetic construct
  misc_feature 1..16: note = synthetic [barcode part1]
  source 1..16: mol_type = other DNA
gtgtatcgagttagag

SEQ ID NO: 44397 - DNA, 16 bp, synthetic construct
  misc_feature 1..16: note = synthetic [barcode part1]
  source 1..16: mol_type = other DNA
tgtgtgtgactaaccg

SEQ ID NO: 44398 - DNA, 16 bp, synthetic construct
  misc_feature 1..16: note = synthetic [barcode part1]
  source 1..16: mol_type = other DNA
gtcctgtctgttgttc

SEQ ID NO: 44399 - DNA, 16 bp, synthetic construct
  misc_feature 1..16: note = synthetic [barcode part1]
  source 1..16: mol_type = other DNA
acgattgccgaccttc

SEQ ID NO: 44400 - DNA, 16 bp, synthetic construct
  misc_feature 1..16: note = synthetic [barcode part1]
  source 1..16: mol_type = other DNA
cggatatcctctggtc

SEQ ID NO: 44401 - DNA, 16 bp, synthetic construct
  misc_feature 1..16: note = synthetic [barcode part1]
  source 1..16: mol_type = other DNA
agagttctccaagacc

SEQ ID NO: 44402 - DNA, 16 bp, synthetic construct
  misc_feature 1..16: note = synthetic [barcode part1]
  source 1..16: mol_type = other DNA
gagagactatcctacc

SEQ ID NO: 44403 - DNA, 16 bp, synthetic construct
  misc_feature 1..16: note = synthetic [barcode part1]
  source 1..16: mol_type = other DNA
ttcctgaccaaggagt

SEQ ID NO: 44404 - DNA, 16 bp, synthetic construct
  misc_feature 1..16: note = synthetic [barcode part1]
  source 1..16: mol_type = other DNA
attcgccgtaatactc

SEQ ID NO: 44405 - DNA, 16 bp, synthetic construct
  misc_feature 1..16: note = synthetic [barcode part1]
  source 1..16: mol_type = other DNA
tacgtcacacaaccag

SEQ ID NO: 44406 - DNA, 16 bp, synthetic construct
  misc_feature 1..16: note = synthetic [barcode part1]
  source 1..16: mol_type = other DNA
gccgacgtaccttgtt

SEQ ID NO: 44407 - DNA, 16 bp, synthetic construct
  misc_feature 1..16: note = synthetic [barcode part1]
  source 1..16: mol_type = other DNA
tcagtaggaactgtcc

SEQ ID NO: 44408 - DNA, 16 bp, synthetic construct
  misc_feature 1..16: note = synthetic [barcode part1]
  source 1..16: mol_type = other DNA
aatctcgttgttcacg

SEQ ID NO: 44409 - DNA, 16 bp, synthetic construct
  misc_feature 1..16: note = synthetic [barcode part1]
  source 1..16: mol_type = other DNA
tcctaactcggatact

SEQ ID NO: 44410 - DNA, 16 bp, synthetic construct
  misc_feature 1..16: note = synthetic [barcode part1]
  source 1..16: mol_type = other DNA
aatccttccaggcacc

SEQ ID NO: 44411 - DNA, 16 bp, synthetic construct
  misc_feature 1..16: note = synthetic [barcode part1]
  source 1..16: mol_type = other DNA
tcaccgttggagtaac

SEQ ID NO: 44412 - DNA, 16 bp, synthetic construct
  misc_feature 1..16: note = synthetic [barcode part1]
  source 1..16: mol_type = other DNA
cagtaatcggcgactt

SEQ ID NO: 44413 - DNA, 16 bp, synthetic construct
  misc_feature 1..16: note = synthetic [barcode part1]
  source 1..16: mol_type = other DNA
gtgatcggttgtacgt

SEQ ID NO: 44414 - DNA, 16 bp, synthetic construct
  misc_feature 1..16: note = synthetic [barcode part1]
  source 1..16: mol_type = other DNA
acgccagaggaattgc

SEQ ID NO: 44415 - DNA, 16 bp, synthetic construct
  misc_feature 1..16: note = synthetic [barcode part1]
  source 1..16: mol_type = other DNA
actgacaattcttcgc

SEQ ID NO: 44416 - DNA, 16 bp, synthetic construct
  misc_feature 1..16: note = synthetic [barcode part1]
  source 1..16: mol_type = other DNA
acggtcggttagtatc

SEQ ID NO: 44417 - DNA, 16 bp, synthetic construct
  misc_feature 1..16: note = synthetic [barcode part1]
  source 1..16: mol_type = other DNA
taggaggacacactgc

SEQ ID NO: 44418 - DNA, 16 bp, synthetic construct
  misc_feature 1..16: note = synthetic [barcode part1]
  source 1..16: mol_type = other DNA
taagaggtcttggcct

SEQ ID NO: 44419 - DNA, 16 bp, synthetic construct
  misc_feature 1..16: note = synthetic [barcode part1]
  source 1..16: mol_type = other DNA
aacgcagagattgccg

SEQ ID NO: 44420 - DNA, 16 bp, synthetic construct
  misc_feature 1..16: note = synthetic [barcode part1]
  source 1..16: mol_type = other DNA
gccgttcgcgaattct

SEQ ID NO: 44421 - DNA, 16 bp, synthetic construct
  misc_feature 1..16: note = synthetic [barcode part1]
  source 1..16: mol_type = other DNA
gaccaatcttcggaac

SEQ ID NO: 44422 - DNA, 16 bp, synthetic construct
  misc_feature 1..16: note = synthetic [barcode part1]
  source 1..16: mol_type = other DNA
aataggtacaggcgag

SEQ ID NO: 44423 - DNA, 16 bp, synthetic construct
  misc_feature 1..16: note = synthetic [barcode part1]
  source 1..16: mol_type = other DNA
acaaggaccagaccgt

SEQ ID NO: 44424 - DNA, 16 bp, synthetic construct
  misc_feature 1..16: note = synthetic [barcode part1]
  source 1..16: mol_type = other DNA
atcaacgtgccagtac

SEQ ID NO: 44425 - DNA, 16 bp, synthetic construct
  misc_feature 1..16: note = synthetic [barcode part1]
  source 1..16: mol_type = other DNA
tcgtatccttacgcct

SEQ ID NO: 44426 - DNA, 16 bp, synthetic construct
  misc_feature 1..16: note = synthetic [barcode part1]
  source 1..16: mol_type = other DNA
ttggtagtacttctgc

SEQ ID NO: 44427 - DNA, 16 bp, synthetic construct
  misc_feature 1..16: note = synthetic [barcode part1]
  source 1..16: mol_type = other DNA
attagaggagagaccg

SEQ ID NO: 44428 - DNA, 16 bp, synthetic construct
  misc_feature 1..16: note = synthetic [barcode part1]
  source 1..16: mol_type = other DNA
agatctaggcgtgtct

SEQ ID NO: 44429 - DNA, 16 bp, synthetic construct
  misc_feature 1..16: note = synthetic [barcode part1]
  source 1..16: mol_type = other DNA
gacgaacgtgaacaag

SEQ ID NO: 44430 - DNA, 16 bp, synthetic construct
  misc_feature 1..16: note = synthetic [barcode part1]
  source 1..16: mol_type = other DNA
agtgtgtctagagaac

SEQ ID NO: 44431 - DNA, 16 bp, synthetic construct
  misc_feature 1..16: note = synthetic [barcode part1]
  source 1..16: mol_type = other DNA
aactgattggccgact

SEQ ID NO: 44432 - DNA, 16 bp, synthetic construct
  misc_feature 1..16: note = synthetic [barcode part1]
  source 1..16: mol_type = other DNA
agaatctcctgtctgt

SEQ ID NO: 44433 - DNA, 16 bp, synthetic construct
  misc_feature 1..16: note = synthetic [barcode part1]
  source 1..16: mol_type = other DNA
aaccaggcggattcag

SEQ ID NO: 44434 - DNA, 16 bp, synthetic construct
  misc_feature 1..16: note = synthetic [barcode part1]
  source 1..16: mol_type = other DNA
tcaggacactcgtcct

SEQ ID NO: 44435 - DNA, 16 bp, synthetic construct
  misc_feature 1..16: note = synthetic [barcode part1]
  source 1..16: mol_type = other DNA
tcgcacttcactaggc

SEQ ID NO: 44436 - DNA, 16 bp, synthetic construct
  misc_feature 1..16: note = synthetic [barcode part1]
  source 1..16: mol_type = other DNA
tcactcctataggttg

SEQ ID NO: 44437 - DNA, 16 bp, synthetic construct
  misc_feature 1..16: note = synthetic [barcode part1]
  source 1..16: mol_type = other DNA
taggcgtatacggtct

SEQ ID NO: 44438 - DNA, 16 bp, synthetic construct
  misc_feature 1..16: note = synthetic [barcode part1]
  source 1..16: mol_type = other DNA
gaagtcgtaaccttcg

SEQ ID NO: 44439 - DNA, 16 bp, synthetic construct
  misc_feature 1..16: note = synthetic [barcode part1]
  source 1..16: mol_type = other DNA
tccgttctaagatctg

SEQ ID NO: 44440 - DNA, 16 bp, synthetic construct
  misc_feature 1..16: note = synthetic [barcode part1]
  source 1..16: mol_type = other DNA
acgccgagaagtagtc

SEQ ID NO: 44441 - DNA, 16 bp, synthetic construct
  misc_feature 1..16: note = synthetic [barcode part1]
  source 1..16: mol_type = other DNA
gataatcctggcggtt

SEQ ID NO: 44442 - DNA, 16 bp, synthetic construct
  misc_feature 1..16: note = synthetic [barcode part1]
  source 1..16: mol_type = other DNA
aaggacaccacacctt

SEQ ID NO: 44443 - DNA, 16 bp, synthetic construct
  misc_feature 1..16: note = synthetic [barcode part1]
  source 1..16: mol_type = other DNA
tgccgaattgtacctt

SEQ ID NO: 44444 - DNA, 16 bp, synthetic construct
  misc_feature 1..16: note = synthetic [barcode part1]
  source 1..16: mol_type = other DNA
agtcacgccgagaagt

SEQ ID NO: 44445 - DNA, 16 bp, synthetic construct
  misc_feature 1..16: note = synthetic [barcode part1]
  source 1..16: mol_type = other DNA
gtcggtaagtgcactt

SEQ ID NO: 44446 - DNA, 16 bp, synthetic construct
  misc_feature 1..16: note = synthetic [barcode part1]
  source 1..16: mol_type = other DNA
tccactggtgtagtcc

SEQ ID NO: 44447 - DNA, 16 bp, synthetic construct
  misc_feature 1..16: note = synthetic [barcode part1]
  source 1..16: mol_type = other DNA
gtcgatatcgtgcaac

SEQ ID NO: 44448 - DNA, 16 bp, synthetic construct
  misc_feature 1..16: note = synthetic [barcode part1]
  source 1..16: mol_type = other DNA
gttgtcttgtccaagt

SEQ ID NO: 44449 - DNA, 16 bp, synthetic construct
  misc_feature 1..16: note = synthetic [barcode part1]
  source 1..16: mol_type = other DNA
cacacaggcaatcact

SEQ ID NO: 44450 - DNA, 16 bp, synthetic construct
  misc_feature 1..16: note = synthetic [barcode part1]
  source 1..16: mol_type = other DNA
tcctattggtgtctag

SEQ ID NO: 44451 - DNA, 16 bp, synthetic construct
  misc_feature 1..16: note = synthetic [barcode part1]
  source 1..16: mol_type = other DNA
cgtggatcgtcgttct

SEQ ID NO: 44452 - DNA, 16 bp, synthetic construct
  misc_feature 1..16: note = synthetic [barcode part1]
  source 1..16: mol_type = other DNA
ccaacagttcagtggt

SEQ ID NO: 44453 - DNA, 16 bp, synthetic construct
  misc_feature 1..16: note = synthetic [barcode part1]
  source 1..16: mol_type = other DNA
gattggccggttagtt

SEQ ID NO: 44454 - DNA, 16 bp, synthetic construct
  misc_feature 1..16: note = synthetic [barcode part1]
  source 1..16: mol_type = other DNA
ttgatcttccgtgaac

SEQ ID NO: 44455 - DNA, 16 bp, synthetic construct
  misc_feature 1..16: note = synthetic [barcode part1]
  source 1..16: mol_type = other DNA
gtcaggttcgcactct

SEQ ID NO: 44456 - DNA, 16 bp, synthetic construct
  misc_feature 1..16: note = synthetic [barcode part1]
  source 1..16: mol_type = other DNA
tagtagttgcgttcct

SEQ ID NO: 44457 - DNA, 16 bp, synthetic construct
  misc_feature 1..16: note = synthetic [barcode part1]
  source 1..16: mol_type = other DNA
tacaccttccaacagt

SEQ ID NO: 44458 - DNA, 16 bp, synthetic construct
  misc_feature 1..16: note = synthetic [barcode part1]
  source 1..16: mol_type = other DNA
cggaccaatcgttaac

SEQ ID NO: 44459 - DNA, 16 bp, synthetic construct
  misc_feature 1..16: note = synthetic [barcode part1]
  source 1..16: mol_type = other DNA
ccgtccgtctaagatc

SEQ ID NO: 44460 - DNA, 16 bp, synthetic construct
  misc_feature 1..16: note = synthetic [barcode part1]
  source 1..16: mol_type = other DNA
tactggaccacgttcc

SEQ ID NO: 44461 - DNA, 16 bp, synthetic construct
  misc_feature 1..16: note = synthetic [barcode part1]
  source 1..16: mol_type = other DNA
gcgtattcggaagacg

SEQ ID NO: 44462 - DNA, 16 bp, synthetic construct
  misc_feature 1..16: note = synthetic [barcode part1]
  source 1..16: mol_type = other DNA
ccactgcggatctgtt

SEQ ID NO: 44463 - DNA, 16 bp, synthetic construct
  misc_feature 1..16: note = synthetic [barcode part1]
  source 1..16: mol_type = other DNA
tctatctgcctgttcg

SEQ ID NO: 44464 - DNA, 16 bp, synthetic construct
  misc_feature 1..16: note = synthetic [barcode part1]
  source 1..16: mol_type = other DNA
tgttccaggacttgtt

SEQ ID NO: 44465 - DNA, 16 bp, synthetic construct
  misc_feature 1..16: note = synthetic [barcode part1]
  source 1..16: mol_type = other DNA
accaggtccgtactct

SEQ ID NO: 44466 - DNA, 16 bp, synthetic construct
  misc_feature 1..16: note = synthetic [barcode part1]
  source 1..16: mol_type = other DNA
atcggttcctctcttg

SEQ ID NO: 44467 - DNA, 16 bp, synthetic construct
  misc_feature 1..16: note = synthetic [barcode part1]
  source 1..16: mol_type = other DNA
tcgtgcctggatcact

SEQ ID NO: 44468 - DNA, 16 bp, synthetic construct
  misc_feature 1..16: note = synthetic [barcode part1]
  source 1..16: mol_type = other DNA
tacggtaagacaggcc

SEQ ID NO: 44469 - DNA, 16 bp, synthetic construct
  misc_feature 1..16: note = synthetic [barcode part1]
  source 1..16: mol_type = other DNA
actagtgagtgcgttc

SEQ ID NO: 44470 - DNA, 16 bp, synthetic construct
  misc_feature 1..16: note = synthetic [barcode part1]
  source 1..16: mol_type = other DNA
tattaacagaggaccg

SEQ ID NO: 44471 - DNA, 16 bp, synthetic construct
  misc_feature 1..16: note = synthetic [barcode part1]
  source 1..16: mol_type = other DNA
gcgtcaacgactcctt

SEQ ID NO: 44472 - DNA, 16 bp, synthetic construct
  misc_feature 1..16: note = synthetic [barcode part1]
  source 1..16: mol_type = other DNA
tgagacttggtaccac

SEQ ID NO: 44473 - DNA, 16 bp, synthetic construct
  misc_feature 1..16: note = synthetic [barcode part1]
  source 1..16: mol_type = other DNA
tcgttaccgtcacctt

SEQ ID NO: 44474 - DNA, 16 bp, synthetic construct
  misc_feature 1..16: note = synthetic [barcode part1]
  source 1..16: mol_type = other DNA
aaccacaacactggtc

SEQ ID NO: 44475 - DNA, 16 bp, synthetic construct
  misc_feature 1..16: note = synthetic [barcode part1]
  source 1..16: mol_type = other DNA
tcgtgattcggttgag

SEQ ID NO: 44476 - DNA, 16 bp, synthetic construct
  misc_feature 1..16: note = synthetic [barcode part1]
  source 1..16: mol_type = other DNA
acctagagtctgcaac

SEQ ID NO: 44477 - DNA, 16 bp, synthetic construct
  misc_feature 1..16: note = synthetic [barcode part1]
  source 1..16: mol_type = other DNA
acactgtgacgaatag

SEQ ID NO: 44478 - DNA, 16 bp, synthetic construct
  misc_feature 1..16: note = synthetic [barcode part1]
  source 1..16: mol_type = other DNA
tggtgccgtgaacaag

SEQ ID NO: 44479 - DNA, 16 bp, synthetic construct
  misc_feature 1..16: note = synthetic [barcode part1]
  source 1..16: mol_type = other DNA
taactcttgcgtagtc

SEQ ID NO: 44480 - DNA, 16 bp, synthetic construct
  misc_feature 1..16: note = synthetic [barcode part1]
  source 1..16: mol_type = other DNA
cggttgattgaggtct

SEQ ID NO: 44481 - DNA, 16 bp, synthetic construct
  misc_feature 1..16: note = synthetic [barcode part1]
  source 1..16: mol_type = other DNA
gtcaggatctcagttg

SEQ ID NO: 44482 - DNA, 16 bp, synthetic construct
  misc_feature 1..16: note = synthetic [barcode part1]
  source 1..16: mol_type = other DNA
cctctcaatagttacg

SEQ ID NO: 44483 - DNA, 16 bp, synthetic construct
  misc_feature 1..16: note = synthetic [barcode part1]
  source 1..16: mol_type = other DNA
tcctacgtgacaattc

SEQ ID NO: 44484 - DNA, 16 bp, synthetic construct
  misc_feature 1..16: note = synthetic [barcode part1]
  source 1..16: mol_type = other DNA
tgtcaagttgtactcc

SEQ ID NO: 44485 - DNA, 16 bp, synthetic construct
  misc_feature 1..16: note = synthetic [barcode part1]
  source 1..16: mol_type = other DNA
tcctgtctcgtgaacg

SEQ ID NO: 44486 - DNA, 16 bp, synthetic construct
  misc_feature 1..16: note = synthetic [barcode part1]
  source 1..16: mol_type = other DNA
tgcactaataccgacg

SEQ ID NO: 44487 - DNA, 16 bp, synthetic construct
  misc_feature 1..16: note = synthetic [barcode part1]
  source 1..16: mol_type = other DNA
cgtcttcttagatcag

SEQ ID NO: 44488 - DNA, 16 bp, synthetic construct
  misc_feature 1..16: note = synthetic [barcode part1]
  source 1..16: mol_type = other DNA
tagacgttgcaccaac

SEQ ID NO: 44489 - DNA, 16 bp, synthetic construct
  misc_feature 1..16: note = synthetic [barcode part1]
  source 1..16: mol_type = other DNA
ccggtccttgttattc

SEQ ID NO: 44490 - DNA, 16 bp, synthetic construct
  misc_feature 1..16: note = synthetic [barcode part1]
  source 1..16: mol_type = other DNA
tgtgtgaagtgtgtcc

SEQ ID NO: 44491 - DNA, 16 bp, synthetic construct
  misc_feature 1..16: note = synthetic [barcode part1]
  source 1..16: mol_type = other DNA
cgttgttgtaggacgt

SEQ ID NO: 44492 - DNA, 16 bp, synthetic construct
  misc_feature 1..16: note = synthetic [barcode part1]
  source 1..16: mol_type = other DNA
cctgtacacgtaagac

SEQ ID NO: 44493 - DNA, 16 bp, synthetic construct
  misc_feature 1..16: note = synthetic [barcode part1]
  source 1..16: mol_type = other DNA
gcgttgagttactctt

SEQ ID NO: 44494 - DNA, 16 bp, synthetic construct
  misc_feature 1..16: note = synthetic [barcode part1]
  source 1..16: mol_type = other DNA
gtgtggttaatcgcgt

SEQ ID NO: 44495 - DNA, 16 bp, synthetic construct
  misc_feature 1..16: note = synthetic [barcode part1]
  source 1..16: mol_type = other DNA
ttatcaagacctggcg

SEQ ID NO: 44496 - DNA, 16 bp, synthetic construct
  misc_feature 1..16: note = synthetic [barcode part1]
  source 1..16: mol_type = other DNA
atcaggttcgcacctc

SEQ ID NO: 44497 - DNA, 16 bp, synthetic construct
  misc_feature 1..16: note = synthetic [barcode part1]
  source 1..16: mol_type = other DNA
gtaattagaggtcgac

SEQ ID NO: 44498 - DNA, 16 bp, synthetic construct
  misc_feature 1..16: note = synthetic [barcode part1]
  source 1..16: mol_type = other DNA
cgtaggtacagacctt

SEQ ID NO: 44499 - DNA, 16 bp, synthetic construct
  misc_feature 1..16: note = synthetic [barcode part1]
  source 1..16: mol_type = other DNA
cactctactgccttgt

SEQ ID NO: 44500 - DNA, 16 bp, synthetic construct
  misc_feature 1..16: note = synthetic [barcode part1]
  source 1..16: mol_type = other DNA
tacgacttggtctccg

SEQ ID NO: 44501 - DNA, 16 bp, synthetic construct
  misc_feature 1..16: note = synthetic [barcode part1]
  source 1..16: mol_type = other DNA
aacgtcaagtctcgac

SEQ ID NO: 44502 - DNA, 16 bp, synthetic construct
  misc_feature 1..16: note = synthetic [barcode part1]
  source 1..16: mol_type = other DNA
tctcaacgtacctagt

SEQ ID NO: 44503 - DNA, 16 bp, synthetic construct
  misc_feature 1..16: note = synthetic [barcode part1]
  source 1..16: mol_type = other DNA
tggcgcagttaggaac

SEQ ID NO: 44504 - DNA, 16 bp, synthetic construct
  misc_feature 1..16: note = synthetic [barcode part1]
  source 1..16: mol_type = other DNA
cactgagttacactct

SEQ ID NO: 44505 - DNA, 16 bp, synthetic construct
  misc_feature 1..16: note = synthetic [barcode part1]
  source 1..16: mol_type = other DNA
aggccaacgatcacag

SEQ ID NO: 44506 - DNA, 16 bp, synthetic construct
  misc_feature 1..16: note = synthetic [barcode part1]
  source 1..16: mol_type = other DNA
aaccggatcgttatcg

SEQ ID NO: 44507 - DNA, 16 bp, synthetic construct
  misc_feature 1..16: note = synthetic [barcode part1]
  source 1..16: mol_type = other DNA
gcgatactctctctct

SEQ ID NO: 44508 - DNA, 16 bp, synthetic construct
  misc_feature 1..16: note = synthetic [barcode part1]
  source 1..16: mol_type = other DNA
ttgtgagattctctgc

SEQ ID NO: 44509 - DNA, 16 bp, synthetic construct
  misc_feature 1..16: note = synthetic [barcode part1]
  source 1..16: mol_type = other DNA
tgtacctgcagagact

SEQ ID NO: 44510 - DNA, 16 bp, synthetic construct
  misc_feature 1..16: note = synthetic [barcode part1]
  source 1..16: mol_type = other DNA
tacttgtaacgttgcc

SEQ ID NO: 44511 - DNA, 16 bp, synthetic construct
  misc_feature 1..16: note = synthetic [barcode part1]
  source 1..16: mol_type = other DNA
ttcgttagattacgcc

SEQ ID NO: 44512 - DNA, 16 bp, synthetic construct
  misc_feature 1..16: note = synthetic [barcode part1]
  source 1..16: mol_type = other DNA
attgtctgaatctgcc

SEQ ID NO: 44513 - DNA, 16 bp, synthetic construct
  misc_feature 1..16: note = synthetic [barcode part1]
  source 1..16: mol_type = other DNA
aatccgattccgcgtc

SEQ ID NO: 44514 - DNA, 16 bp, synthetic construct
  misc_feature 1..16: note = synthetic [barcode part1]
  source 1..16: mol_type = other DNA
ttctctccttctctcc

SEQ ID NO: 44515 - DNA, 16 bp, synthetic construct
  misc_feature 1..16: note = synthetic [barcode part1]
  source 1..16: mol_type = other DNA
gaagattctggaggag

SEQ ID NO: 44516 - DNA, 16 bp, synthetic construct
  misc_feature 1..16: note = synthetic [barcode part1]
  source 1..16: mol_type = other DNA
actaacggacacactc

SEQ ID NO: 44517 - DNA, 16 bp, synthetic construct
  misc_feature 1..16: note = synthetic [barcode part1]
  source 1..16: mol_type = other DNA
acgaaccaccactcct

SEQ ID NO: 44518 - DNA, 16 bp, synthetic construct
  misc_feature 1..16: note = synthetic [barcode part1]
  source 1..16: mol_type = other DNA
attcgcacggtggaag

SEQ ID NO: 44519 - DNA, 16 bp, synthetic construct
  misc_feature 1..16: note = synthetic [barcode part1]
  source 1..16: mol_type = other DNA
cgtgtggtaccttgtc

SEQ ID NO: 44520 - DNA, 16 bp, synthetic construct
  misc_feature 1..16: note = synthetic [barcode part1]
  source 1..16: mol_type = other DNA
gtattctcctctgcac

SEQ ID NO: 44521 - DNA, 16 bp, synthetic construct
  misc_feature 1..16: note = synthetic [barcode part1]
  source 1..16: mol_type = other DNA
tcgtcaactctgcgtg

SEQ ID NO: 44522 - DNA, 16 bp, synthetic construct
  misc_feature 1..16: note = synthetic [barcode part1]
  source 1..16: mol_type = other DNA
cgttattgtggccgtc

SEQ ID NO: 44523 - DNA, 16 bp, synthetic construct
  misc_feature 1..16: note = synthetic [barcode part1]
  source 1..16: mol_type = other DNA
ccgacgttgcaattag

SEQ ID NO: 44524 - DNA, 16 bp, synthetic construct
  misc_feature 1..16: note = synthetic [barcode part1]
  source 1..16: mol_type = other DNA
gcgtaatacgtaccac

SEQ ID NO: 44525 - DNA, 16 bp, synthetic construct
  misc_feature 1..16: note = synthetic [barcode part1]
  source 1..16: mol_type = other DNA
tgagatccacaacgtc

SEQ ID NO: 44526 - DNA, 16 bp, synthetic construct
  misc_feature 1..16: note = synthetic [barcode part1]
  source 1..16: mol_type = other DNA
gcgtgtgttaattggc

SEQ ID NO: 44527 - DNA, 16 bp, synthetic construct
  misc_feature 1..16: note = synthetic [barcode part1]
  source 1..16: mol_type = other DNA
atcgtcttaccgtcct

SEQ ID NO: 44528 - DNA, 16 bp, synthetic construct
  misc_feature 1..16: note = synthetic [barcode part1]
  source 1..16: mol_type = other DNA
tcggagagttatcctg

SEQ ID NO: 44529 - DNA, 16 bp, synthetic construct
  misc_feature 1..16: note = synthetic [barcode part1]
  source 1..16: mol_type = other DNA
gtcacggtacctgttc

SEQ ID NO: 44530 - DNA, 16 bp, synthetic construct
  misc_feature 1..16: note = synthetic [barcode part1]
  source 1..16: mol_type = other DNA
gatcacggacctcctt

SEQ ID NO: 44531 - DNA, 16 bp, synthetic construct
  misc_feature 1..16: note = synthetic [barcode part1]
  source 1..16: mol_type = other DNA
ttctcaatagtgtgcc

SEQ ID NO: 44532 - DNA, 16 bp, synthetic construct
  misc_feature 1..16: note = synthetic [barcode part1]
  source 1..16: mol_type = other DNA
atcttactatcgacgc

SEQ ID NO: 44533 - DNA, 16 bp, synthetic construct
  misc_feature 1..16: note = synthetic [barcode part1]
  source 1..16: mol_type = other DNA
caagacctcctgaagt

SEQ ID NO: 44534 - DNA, 16 bp, synthetic construct
  misc_feature 1..16: note = synthetic [barcode part1]
  source 1..16: mol_type = other DNA
gagttggaccagtgtg

SEQ ID NO: 44535 - DNA, 16 bp, synthetic construct
  misc_feature 1..16: note = synthetic [barcode part1]
  source 1..16: mol_type = other DNA
aacacctacaatcgcg

SEQ ID NO: 44536 - DNA, 16 bp, synthetic construct
  misc_feature 1..16: note = synthetic [barcode part1]
  source 1..16: mol_type = other DNA
accaggagtatatcag

SEQ ID NO: 44537 - DNA, 16 bp, synthetic construct
  misc_feature 1..16: note = synthetic [barcode part1]
  source 1..16: mol_type = other DNA
atcagatctgtgcctt

SEQ ID NO: 44538 - DNA, 16 bp, synthetic construct
  misc_feature 1..16: note = synthetic [barcode part1]
  source 1..16: mol_type = other DNA
cggagtatcacgcaag

SEQ ID NO: 44539 - DNA, 16 bp, synthetic construct
  misc_feature 1..16: note = synthetic [barcode part1]
  source 1..16: mol_type = other DNA
ttcagtgtggatcacg

SEQ ID NO: 44540 - DNA, 16 bp, synthetic construct
  misc_feature 1..16: note = synthetic [barcode part1]
  source 1..16: mol_type = other DNA
acctcgtacaattgtc

SEQ ID NO: 44541 - DNA, 16 bp, synthetic construct
  misc_feature 1..16: note = synthetic [barcode part1]
  source 1..16: mol_type = other DNA
caggtataatcacgcc

SEQ ID NO: 44542 - DNA, 16 bp, synthetic construct
  misc_feature 1..16: note = synthetic [barcode part1]
  source 1..16: mol_type = other DNA
gcgacctcttgataag

SEQ ID NO: 44543 - DNA, 16 bp, synthetic construct
  misc_feature 1..16: note = synthetic [barcode part1]
  source 1..16: mol_type = other DNA
agtacgtagaactgac

SEQ ID NO: 44544 - DNA, 16 bp, synthetic construct
  misc_feature 1..16: note = synthetic [barcode part1]
  source 1..16: mol_type = other DNA
ttgatctctgcgtggc

SEQ ID NO: 44545 - DNA, 16 bp, synthetic construct
  misc_feature 1..16: note = synthetic [barcode part1]
  source 1..16: mol_type = other DNA
accgtcctatccaggt

SEQ ID NO: 44546 - DNA, 16 bp, synthetic construct
  misc_feature 1..16: note = synthetic [barcode part1]
  source 1..16: mol_type = other DNA
gtgtggattcagtaag

SEQ ID NO: 44547 - DNA, 16 bp, synthetic construct
  misc_feature 1..16: note = synthetic [barcode part1]
  source 1..16: mol_type = other DNA
tgactcctggttatac

SEQ ID NO: 44548 - DNA, 16 bp, synthetic construct
  misc_feature 1..16: note = synthetic [barcode part1]
  source 1..16: mol_type = other DNA
aataaggaactcgtgc

SEQ ID NO: 44549 - DNA, 16 bp, synthetic construct
  misc_feature 1..16: note = synthetic [barcode part1]
  source 1..16: mol_type = other DNA
acgactaatacgccac

SEQ ID NO: 44550 - DNA, 16 bp, synthetic construct
  misc_feature 1..16: note = synthetic [barcode part1]
  source 1..16: mol_type = other DNA
cctggtcaacttctct

SEQ ID NO: 44551 - DNA, 16 bp, synthetic construct
  misc_feature 1..16: note = synthetic [barcode part1]
  source 1..16: mol_type = other DNA
tctgaccgaagaactc

SEQ ID NO: 44552 - DNA, 16 bp, synthetic construct
  misc_feature 1..16: note = synthetic [barcode part1]
  source 1..16: mol_type = other DNA
ttcgtgacaccacctg

SEQ ID NO: 44553 - DNA, 16 bp, synthetic construct
  misc_feature 1..16: note = synthetic [barcode part1]
  source 1..16: mol_type = other DNA
gtgatcttcgcgttcg

SEQ ID NO: 44554 - DNA, 16 bp, synthetic construct
  misc_feature 1..16: note = synthetic [barcode part1]
  source 1..16: mol_type = other DNA
ttggactaagacacag

SEQ ID NO: 44555 - DNA, 16 bp, synthetic construct
  misc_feature 1..16: note = synthetic [barcode part1]
  source 1..16: mol_type = other DNA
acgtgtgacgttacgt

SEQ ID NO: 44556 - DNA, 16 bp, synthetic construct
  misc_feature 1..16: note = synthetic [barcode part1]
  source 1..16: mol_type = other DNA
atcggtagagttgaac

SEQ ID NO: 44557 - DNA, 16 bp, synthetic construct
  misc_feature 1..16: note = synthetic [barcode part1]
  source 1..16: mol_type = other DNA
gcgcggttctcaatct

SEQ ID NO: 44558 - DNA, 16 bp, synthetic construct
  misc_feature 1..16: note = synthetic [barcode part1]
  source 1..16: mol_type = other DNA
gtgtccgatcttgtcg

SEQ ID NO: 44559 - DNA, 16 bp, synthetic construct
  misc_feature 1..16: note = synthetic [barcode part1]
  source 1..16: mol_type = other DNA
agactcaggtgtatcc

SEQ ID NO: 44560 - DNA, 16 bp, synthetic construct
  misc_feature 1..16: note = synthetic [barcode part1]
  source 1..16: mol_type = other DNA
ccgaacgttacaagtc

SEQ ID NO: 44561 - DNA, 16 bp, synthetic construct
  misc_feature 1..16: note = synthetic [barcode part1]
  source 1..16: mol_type = other DNA
cgtgaagaccgttgag

SEQ ID NO: 44562 - DNA, 16 bp, synthetic construct
  misc_feature 1..16: note = synthetic [barcode part1]
  source 1..16: mol_type = other DNA
gtatcgtagtagacag

SEQ ID NO: 44563 - DNA, 16 bp, synthetic construct
  misc_feature 1..16: note = synthetic [barcode part1]
  source 1..16: mol_type = other DNA
caattgaggtcgacct

SEQ ID NO: 44564 - DNA, 16 bp, synthetic construct
  misc_feature 1..16: note = synthetic [barcode part1]
  source 1..16: mol_type = other DNA
ccaacttgcaactgtt

SEQ ID NO: 44565 - DNA, 16 bp, synthetic construct
  misc_feature 1..16: note = synthetic [barcode part1]
  source 1..16: mol_type = other DNA
aaccgtgagttaaggt

SEQ ID NO: 44566 - DNA, 16 bp, synthetic construct
  misc_feature 1..16: note = synthetic [barcode part1]
  source 1..16: mol_type = other DNA
acactacgcagtatcg

SEQ ID NO: 44567 - DNA, 16 bp, synthetic construct
  misc_feature 1..16: note = synthetic [barcode part1]
  source 1..16: mol_type = other DNA
cgaactgagtcgttgt

SEQ ID NO: 44568 - DNA, 16 bp, synthetic construct
  misc_feature 1..16: note = synthetic [barcode part1]
  source 1..16: mol_type = other DNA
cgtaccttaccgagtc

SEQ ID NO: 44569 - DNA, 16 bp, synthetic construct
  misc_feature 1..16: note = synthetic [barcode part1]
  source 1..16: mol_type = other DNA
agtctgtcctaggtag

SEQ ID NO: 44570 - DNA, 16 bp, synthetic construct
  misc_feature 1..16: note = synthetic [barcode part1]
  source 1..16: mol_type = other DNA
cgcgagtgtgatagac

SEQ ID NO: 44571 - DNA, 16 bp, synthetic construct
  misc_feature 1..16: note = synthetic [barcode part1]
  source 1..16: mol_type = other DNA
attagtacgccttacc

SEQ ID NO: 44572 - DNA, 16 bp, synthetic construct
  misc_feature 1..16: note = synthetic [barcode part1]
  source 1..16: mol_type = other DNA
gtcggacgataatctc

SEQ ID NO: 44573 - DNA, 16 bp, synthetic construct
  misc_feature 1..16: note = synthetic [barcode part1]
  source 1..16: mol_type = other DNA
tctcgaacctgcctag

SEQ ID NO: 44574 - DNA, 16 bp, synthetic construct
  misc_feature 1..16: note = synthetic [barcode part1]
  source 1..16: mol_type = other DNA
tcgaggtcttaggact

SEQ ID NO: 44575 - DNA, 16 bp, synthetic construct
  misc_feature 1..16: note = synthetic [barcode part1]
  source 1..16: mol_type = other DNA
atagtactcgaggcct

SEQ ID NO: 44576 - DNA, 16 bp, synthetic construct
  misc_feature 1..16: note = synthetic [barcode part1]
  source 1..16: mol_type = other DNA
gattcaacgactcggt

SEQ ID NO: 44577 - DNA, 16 bp, synthetic construct
  misc_feature 1..16: note = synthetic [barcode part1]
  source 1..16: mol_type = other DNA
tcaaggtaggtctcac

SEQ ID NO: 44578 - DNA, 16 bp, synthetic construct
  misc_feature 1..16: note = synthetic [barcode part1]
  source 1..16: mol_type = other DNA
atctcagaccacagtg

SEQ ID NO: 44579 - DNA, 16 bp, synthetic construct
  misc_feature 1..16: note = synthetic [barcode part1]
  source 1..16: mol_type = other DNA
cgccgtcacgattatc

SEQ ID NO: 44580 - DNA, 16 bp, synthetic construct
  misc_feature 1..16: note = synthetic [barcode part1]
  source 1..16: mol_type = other DNA
cctatagtcgtgagtg

SEQ ID NO: 44581 - DNA, 16 bp, synthetic construct
  misc_feature 1..16: note = synthetic [barcode part1]
  source 1..16: mol_type = other DNA
agtgacctgcgttcct

SEQ ID NO: 44582 - DNA, 16 bp, synthetic construct
  misc_feature 1..16: note = synthetic [barcode part1]
  source 1..16: mol_type = other DNA
tcagtaggtccgatac

SEQ ID NO: 44583 - DNA, 16 bp, synthetic construct
  misc_feature 1..16: note = synthetic [barcode part1]
  source 1..16: mol_type = other DNA
tacaggtgtagactcc

SEQ ID NO: 44584 - DNA, 16 bp, synthetic construct
  misc_feature 1..16: note = synthetic [barcode part1]
  source 1..16: mol_type = other DNA
tagtggttgtggaggc

SEQ ID NO: 44585 - DNA, 16 bp, synthetic construct
  misc_feature 1..16: note = synthetic [barcode part1]
  source 1..16: mol_type = other DNA
gtggccgtcttaacct

SEQ ID NO: 44586 - DNA, 16 bp, synthetic construct
  misc_feature 1..16: note = synthetic [barcode part1]
  source 1..16: mol_type = other DNA
tagtacgaagaaccac

SEQ ID NO: 44587 - DNA, 16 bp, synthetic construct
  misc_feature 1..16: note = synthetic [barcode part1]
  source 1..16: mol_type = other DNA
tggttaggttaaccgc

SEQ ID NO: 44588 - DNA, 16 bp, synthetic construct
  misc_feature 1..16: note = synthetic [barcode part1]
  source 1..16: mol_type = other DNA
cagtgtgtgcagactt

SEQ ID NO: 44589 - DNA, 16 bp, synthetic construct
  misc_feature 1..16: note = synthetic [barcode part1]
  source 1..16: mol_type = other DNA
acgactggaggttggt

SEQ ID NO: 44590 - DNA, 16 bp, synthetic construct
  misc_feature 1..16: note = synthetic [barcode part1]
  source 1..16: mol_type = other DNA
acgccaagtcacctct

SEQ ID NO: 44591 - DNA, 16 bp, synthetic construct
  misc_feature 1..16: note = synthetic [barcode part1]
  source 1..16: mol_type = other DNA
agtcactctgtgtccg

SEQ ID NO: 44592 - DNA, 16 bp, synthetic construct
  misc_feature 1..16: note = synthetic [barcode part1]
  source 1..16: mol_type = other DNA
acgttcttggtgactt

SEQ ID NO: 44593 - DNA, 16 bp, synthetic construct
  misc_feature 1..16: note = synthetic [barcode part1]
  source 1..16: mol_type = other DNA
gtctcgttcgtacgac

SEQ ID NO: 44594 - DNA, 16 bp, synthetic construct
  misc_feature 1..16: note = synthetic [barcode part1]
  source 1..16: mol_type = other DNA
ttagacgttcgtcgcc

SEQ ID NO: 44595 - DNA, 16 bp, synthetic construct
  misc_feature 1..16: note = synthetic [barcode part1]
  source 1..16: mol_type = other DNA
caagtcgccttgtatt

SEQ ID NO: 44596 - DNA, 16 bp, synthetic construct
  misc_feature 1..16: note = synthetic [barcode part1]
  source 1..16: mol_type = other DNA
gcagactaaccacact

SEQ ID NO: 44597 - DNA, 16 bp, synthetic construct
  misc_feature 1..16: note = synthetic [barcode part1]
  source 1..16: mol_type = other DNA
atagacctgataaggc

SEQ ID NO: 44598 - DNA, 16 bp, synthetic construct
  misc_feature 1..16: note = synthetic [barcode part1]
  source 1..16: mol_type = other DNA
aacaattctaggccgc

SEQ ID NO: 44599 - DNA, 16 bp, synthetic construct
  misc_feature 1..16: note = synthetic [barcode part1]
  source 1..16: mol_type = other DNA
gtccacgatcacttcg

SEQ ID NO: 44600 - DNA, 16 bp, synthetic construct
  misc_feature 1..16: note = synthetic [barcode part1]
  source 1..16: mol_type = other DNA
tgacttggtaagaacg

SEQ ID NO: 44601 - DNA, 16 bp, synthetic construct
  misc_feature 1..16: note = synthetic [barcode part1]
  source 1..16: mol_type = other DNA
cagagacttgtgttcg

SEQ ID NO: 44602 - DNA, 16 bp, synthetic construct
  misc_feature 1..16: note = synthetic [barcode part1]
  source 1..16: mol_type = other DNA
tccttaagtactggtc

SEQ ID NO: 44603 - DNA, 16 bp, synthetic construct
  misc_feature 1..16: note = synthetic [barcode part1]
  source 1..16: mol_type = other DNA
attggtctcggttgag

SEQ ID NO: 44604 - DNA, 16 bp, synthetic construct
  misc_feature 1..16: note = synthetic [barcode part1]
  source 1..16: mol_type = other DNA
ccggttctctgatctt

SEQ ID NO: 44605 - DNA, 16 bp, synthetic construct
  misc_feature 1..16: note = synthetic [barcode part1]
  source 1..16: mol_type = other DNA
ttgcagaaggtactcc

SEQ ID NO: 44606 - DNA, 16 bp, synthetic construct
  misc_feature 1..16: note = synthetic [barcode part1]
  source 1..16: mol_type = other DNA
ttcactgcgtagactt

SEQ ID NO: 44607 - DNA, 16 bp, synthetic construct
  misc_feature 1..16: note = synthetic [barcode part1]
  source 1..16: mol_type = other DNA
ccttggttcgaacacc

SEQ ID NO: 44608 - DNA, 16 bp, synthetic construct
  misc_feature 1..16: note = synthetic [barcode part1]
  source 1..16: mol_type = other DNA
acgataccggtactac

SEQ ID NO: 44609 - DNA, 16 bp, synthetic construct
  misc_feature 1..16: note = synthetic [barcode part1]
  source 1..16: mol_type = other DNA
cgcgacgtcacttgtt

SEQ ID NO: 44610 - DNA, 16 bp, synthetic construct
  misc_feature 1..16: note = synthetic [barcode part1]
  source 1..16: mol_type = other DNA
acggttactggaggac

SEQ ID NO: 44611 - DNA, 16 bp, synthetic construct
  misc_feature 1..16: note = synthetic [barcode part1]
  source 1..16: mol_type = other DNA
attctatctgcacggt

SEQ ID NO: 44612 - DNA, 16 bp, synthetic construct
  misc_feature 1..16: note = synthetic [barcode part1]
  source 1..16: mol_type = other DNA
ttggtactcgattctg

SEQ ID NO: 44613 - DNA, 16 bp, synthetic construct
  misc_feature 1..16: note = synthetic [barcode part1]
  source 1..16: mol_type = other DNA
actcttgacctggcgt

SEQ ID NO: 44614 - DNA, 16 bp, synthetic construct
  misc_feature 1..16: note = synthetic [barcode part1]
  source 1..16: mol_type = other DNA
gacgtgtacactggtt

SEQ ID NO: 44615 - DNA, 16 bp, synthetic construct
  misc_feature 1..16: note = synthetic [barcode part1]
  source 1..16: mol_type = other DNA
cgtgcggtctagttct

SEQ ID NO: 44616 - DNA, 16 bp, synthetic construct
  misc_feature 1..16: note = synthetic [barcode part1]
  source 1..16: mol_type = other DNA
aggacaatcgtggatt

SEQ ID NO: 44617 - DNA, 16 bp, synthetic construct
  misc_feature 1..16: note = synthetic [barcode part1]
  source 1..16: mol_type = other DNA
gtctcactgaactcgc

SEQ ID NO: 44618 - DNA, 16 bp, synthetic construct
  misc_feature 1..16: note = synthetic [barcode part1]
  source 1..16: mol_type = other DNA
aacttgcaggcgacag

SEQ ID NO: 44619 - DNA, 16 bp, synthetic construct
  misc_feature 1..16: note = synthetic [barcode part1]
  source 1..16: mol_type = other DNA
cgtgttagaagttgag

SEQ ID NO: 44620 - DNA, 16 bp, synthetic construct
  misc_feature 1..16: note = synthetic [barcode part1]
  source 1..16: mol_type = other DNA
cacctaacgcaagttg

SEQ ID NO: 44621 - DNA, 16 bp, synthetic construct
  misc_feature 1..16: note = synthetic [barcode part1]
  source 1..16: mol_type = other DNA
tcggacgtattcgaac

SEQ ID NO: 44622 - DNA, 16 bp, synthetic construct
  misc_feature 1..16: note = synthetic [barcode part1]
  source 1..16: mol_type = other DNA
acaggtcttcctaact

SEQ ID NO: 44623 - DNA, 16 bp, synthetic construct
  misc_feature 1..16: note = synthetic [barcode part1]
  source 1..16: mol_type = other DNA
tacgtgaagacactcc

SEQ ID NO: 44624 - DNA, 16 bp, synthetic construct
  misc_feature 1..16: note = synthetic [barcode part1]
  source 1..16: mol_type = other DNA
tctgcgtcaataactc

SEQ ID NO: 44625 - DNA, 16 bp, synthetic construct
  misc_feature 1..16: note = synthetic [barcode part1]
  source 1..16: mol_type = other DNA
tcacacacacacaacg

SEQ ID NO: 44626 - DNA, 16 bp, synthetic construct
  misc_feature 1..16: note = synthetic [barcode part1]
  source 1..16: mol_type = other DNA
gacgaaggaagtgatc

SEQ ID NO: 44627 - DNA, 16 bp, synthetic construct
  misc_feature 1..16: note = synthetic [barcode part1]
  source 1..16: mol_type = other DNA
agtgtcgaactctggt

SEQ ID NO: 44628 - DNA, 16 bp, synthetic construct
  misc_feature 1..16: note = synthetic [barcode part1]
  source 1..16: mol_type = other DNA
tcctgcgagagatact

SEQ ID NO: 44629 - DNA, 16 bp, synthetic construct
  misc_feature 1..16: note = synthetic [barcode part1]
  source 1..16: mol_type = other DNA
cgtgttacacgatcag

SEQ ID NO: 44630 - DNA, 16 bp, synthetic construct
  misc_feature 1..16: note = synthetic [barcode part1]
  source 1..16: mol_type = other DNA
taggttacacgtctct

SEQ ID NO: 44631 - DNA, 16 bp, synthetic construct
  misc_feature 1..16: note = synthetic [barcode part1]
  source 1..16: mol_type = other DNA
cacagagttgagttag

SEQ ID NO: 44632 - DNA, 16 bp, synthetic construct
  misc_feature 1..16: note = synthetic [barcode part1]
  source 1..16: mol_type = other DNA
aagaatccaatacgcg

SEQ ID NO: 44633 - DNA, 16 bp, synthetic construct
  misc_feature 1..16: note = synthetic [barcode part1]
  source 1..16: mol_type = other DNA
gactgagacttcctag

SEQ ID NO: 44634 - DNA, 16 bp, synthetic construct
  misc_feature 1..16: note = synthetic [barcode part1]
  source 1..16: mol_type = other DNA
aacaagaccggacgtc

SEQ ID NO: 44635 - DNA, 16 bp, synthetic construct
  misc_feature 1..16: note = synthetic [barcode part1]
  source 1..16: mol_type = other DNA
tcgatccacaaggtac

SEQ ID NO: 44636 - DNA, 16 bp, synthetic construct
  misc_feature 1..16: note = synthetic [barcode part1]
  source 1..16: mol_type = other DNA
ttccttctcaatcggc

SEQ ID NO: 44637 - DNA, 16 bp, synthetic construct
  misc_feature 1..16: note = synthetic [barcode part1]
  source 1..16: mol_type = other DNA
acaactacttcggtct

SEQ ID NO: 44638 - DNA, 16 bp, synthetic construct
  misc_feature 1..16: note = synthetic [barcode part1]
  source 1..16: mol_type = other DNA
gcggagaagttcgact

SEQ ID NO: 44639 - DNA, 16 bp, synthetic construct
  misc_feature 1..16: note = synthetic [barcode part1]
  source 1..16: mol_type = other DNA
cctaccagtgttcgac

SEQ ID NO: 44640 - DNA, 16 bp, synthetic construct
  misc_feature 1..16: note = synthetic [barcode part1]
  source 1..16: mol_type = other DNA
gagtgttcttaggtgc

SEQ ID NO: 44641 - DNA, 16 bp, synthetic construct
  misc_feature 1..16: note = synthetic [barcode part1]
  source 1..16: mol_type = other DNA
gagttggtcttagtcg

SEQ ID NO: 44642 - DNA, 16 bp, synthetic construct
  misc_feature 1..16: note = synthetic [barcode part1]
  source 1..16: mol_type = other DNA
gttcagataggacaac

SEQ ID NO: 44643 - DNA, 16 bp, synthetic construct
  misc_feature 1..16: note = synthetic [barcode part1]
  source 1..16: mol_type = other DNA
acagtgtgtgtcacac

SEQ ID NO: 44644 - DNA, 16 bp, synthetic construct
  misc_feature 1..16: note = synthetic [barcode part1]
  source 1..16: mol_type = other DNA
gcagttgtgtgcaact

SEQ ID NO: 44645 - DNA, 16 bp, synthetic construct
  misc_feature 1..16: note = synthetic [barcode part1]
  source 1..16: mol_type = other DNA
cactccagtggacttc

SEQ ID NO: 44646 - DNA, 16 bp, synthetic construct
  misc_feature 1..16: note = synthetic [barcode part1]
  source 1..16: mol_type = other DNA
tcttacggccgaacct

SEQ ID NO: 44647 - DNA, 16 bp, synthetic construct
  misc_feature 1..16: note = synthetic [barcode part1]
  source 1..16: mol_type = other DNA
gtggaaggattcaatc

SEQ ID NO: 44648 - DNA, 16 bp, synthetic construct
  misc_feature 1..16: note = synthetic [barcode part1]
  source 1..16: mol_type = other DNA
atccgtaacacgactg

SEQ ID NO: 44649 - DNA, 16 bp, synthetic construct
  misc_feature 1..16: note = synthetic [barcode part1]
  source 1..16: mol_type = other DNA
tggcaacttctcgcgt

SEQ ID NO: 44650 - DNA, 16 bp, synthetic construct
  misc_feature 1..16: note = synthetic [barcode part1]
  source 1..16: mol_type = other DNA
cacggatataacaggt

SEQ ID NO: 44651 - DNA, 16 bp, synthetic construct
  misc_feature 1..16: note = synthetic [barcode part1]
  source 1..16: mol_type = other DNA
gatcgactaacaccgt

SEQ ID NO: 44652 - DNA, 16 bp, synthetic construct
  misc_feature 1..16: note = synthetic [barcode part1]
  source 1..16: mol_type = other DNA
ttggcaggttcttact

SEQ ID NO: 44653 - DNA, 16 bp, synthetic construct
  misc_feature 1..16: note = synthetic [barcode part1]
  source 1..16: mol_type = other DNA
atcgtagacagacggc

SEQ ID NO: 44654 - DNA, 16 bp, synthetic construct
  misc_feature 1..16: note = synthetic [barcode part1]
  source 1..16: mol_type = other DNA
attcgcaccttgttag

SEQ ID NO: 44655 - DNA, 16 bp, synthetic construct
  misc_feature 1..16: note = synthetic [barcode part1]
  source 1..16: mol_type = other DNA
ccactctaggatagtg

SEQ ID NO: 44656 - DNA, 16 bp, synthetic construct
  misc_feature 1..16: note = synthetic [barcode part1]
  source 1..16: mol_type = other DNA
accgatactgtacgac

SEQ ID NO: 44657 - DNA, 16 bp, synthetic construct
  misc_feature 1..16: note = synthetic [barcode part1]
  source 1..16: mol_type = other DNA
tgtgactaaccacacg

SEQ ID NO: 44658 - DNA, 16 bp, synthetic construct
  misc_feature 1..16: note = synthetic [barcode part1]
  source 1..16: mol_type = other DNA
ttatcgtcggagtgac

SEQ ID NO: 44659 - DNA, 16 bp, synthetic construct
  misc_feature 1..16: note = synthetic [barcode part1]
  source 1..16: mol_type = other DNA
tctctgaactggtact

SEQ ID NO: 44660 - DNA, 16 bp, synthetic construct
  misc_feature 1..16: note = synthetic [barcode part1]
  source 1..16: mol_type = other DNA
attatactctccgacg

SEQ ID NO: 44661 - DNA, 16 bp, synthetic construct
  misc_feature 1..16: note = synthetic [barcode part1]
  source 1..16: mol_type = other DNA
cgagtcctactgttcg

SEQ ID NO: 44662 - DNA, 16 bp, synthetic construct
  misc_feature 1..16: note = synthetic [barcode part1]
  source 1..16: mol_type = other DNA
gcgtattgtaaggtag

SEQ ID NO: 44663 - DNA, 16 bp, synthetic construct
  misc_feature 1..16: note = synthetic [barcode part1]
  source 1..16: mol_type = other DNA
gaagattgaccggaag

SEQ ID NO: 44664 - DNA, 16 bp, synthetic construct
  misc_feature 1..16: note = synthetic [barcode part1]
  source 1..16: mol_type = other DNA
gcctggatatctgaac

SEQ ID NO: 44665 - DNA, 16 bp, synthetic construct
  misc_feature 1..16: note = synthetic [barcode part1]
  source 1..16: mol_type = other DNA
tcgtggaagtgatagt

SEQ ID NO: 44666 - DNA, 16 bp, synthetic construct
  misc_feature 1..16: note = synthetic [barcode part1]
  source 1..16: mol_type = other DNA
tgcagtgtgcctacct

SEQ ID NO: 44667 - DNA, 16 bp, synthetic construct
  misc_feature 1..16: note = synthetic [barcode part1]
  source 1..16: mol_type = other DNA
agtcgcctattcttag

SEQ ID NO: 44668 - DNA, 16 bp, synthetic construct
  misc_feature 1..16: note = synthetic [barcode part1]
  source 1..16: mol_type = other DNA
actgagttgccaagtc

SEQ ID NO: 44669 - DNA, 16 bp, synthetic construct
  misc_feature 1..16: note = synthetic [barcode part1]
  source 1..16: mol_type = other DNA
taactcttccttcggc

SEQ ID NO: 44670 - DNA, 16 bp, synthetic construct
  misc_feature 1..16: note = synthetic [barcode part1]
  source 1..16: mol_type = other DNA
cgtacaatagacctgc

SEQ ID NO: 44671 - DNA, 16 bp, synthetic construct
  misc_feature 1..16: note = synthetic [barcode part1]
  source 1..16: mol_type = other DNA
tattgcggtcgactag

SEQ ID NO: 44672 - DNA, 16 bp, synthetic construct
  misc_feature 1..16: note = synthetic [barcode part1]
  source 1..16: mol_type = other DNA
gtcgtattggcgagag

SEQ ID NO: 44673 - DNA, 16 bp, synthetic construct
  misc_feature 1..16: note = synthetic [barcode part1]
  source 1..16: mol_type = other DNA
aggttactgttcttgc

SEQ ID NO: 44674 - DNA, 16 bp, synthetic construct
  misc_feature 1..16: note = synthetic [barcode part1]
  source 1..16: mol_type = other DNA
taacttccgactgtac

SEQ ID NO: 44675 - DNA, 16 bp, synthetic construct
  misc_feature 1..16: note = synthetic [barcode part1]
  source 1..16: mol_type = other DNA
tacgagtggtagaatc

SEQ ID NO: 44676 - DNA, 16 bp, synthetic construct
  misc_feature 1..16: note = synthetic [barcode part1]
  source 1..16: mol_type = other DNA
ttcctcctggttgact

SEQ ID NO: 44677 - DNA, 16 bp, synthetic construct
  misc_feature 1..16: note = synthetic [barcode part1]
  source 1..16: mol_type = other DNA
cgacgtcacttacctg

SEQ ID NO: 44678 - DNA, 16 bp, synthetic construct
  misc_feature 1..16: note = synthetic [barcode part1]
  source 1..16: mol_type = other DNA
tgagaaggttacgtgt

SEQ ID NO: 44679 - DNA, 16 bp, synthetic construct
  misc_feature 1..16: note = synthetic [barcode part1]
  source 1..16: mol_type = other DNA
tagaccacctctgtgc

SEQ ID NO: 44680 - DNA, 16 bp, synthetic construct
  misc_feature 1..16: note = synthetic [barcode part1]
  source 1..16: mol_type = other DNA
atagtcaacacgccgt

SEQ ID NO: 44681 - DNA, 16 bp, synthetic construct
  misc_feature 1..16: note = synthetic [barcode part1]
  source 1..16: mol_type = other DNA
tccgcgatcactctag

SEQ ID NO: 44682 - DNA, 16 bp, synthetic construct
  misc_feature 1..16: note = synthetic [barcode part1]
  source 1..16: mol_type = other DNA
taagagtgtcctcacg

SEQ ID NO: 44683 - DNA, 16 bp, synthetic construct
  misc_feature 1..16: note = synthetic [barcode part1]
  source 1..16: mol_type = other DNA
gcagttaggaactggc

SEQ ID NO: 44684 - DNA, 16 bp, synthetic construct
  misc_feature 1..16: note = synthetic [barcode part1]
  source 1..16: mol_type = other DNA
gaggcctacagacaac

SEQ ID NO: 44685 - DNA, 16 bp, synthetic construct
  misc_feature 1..16: note = synthetic [barcode part1]
  source 1..16: mol_type = other DNA
gactactgtgaggacg

SEQ ID NO: 44686 - DNA, 16 bp, synthetic construct
  misc_feature 1..16: note = synthetic [barcode part1]
  source 1..16: mol_type = other DNA
actgttcgacgcctgt

SEQ ID NO: 44687 - DNA, 16 bp, synthetic construct
  misc_feature 1..16: note = synthetic [barcode part1]
  source 1..16: mol_type = other DNA
aggttgttgcctccac

SEQ ID NO: 44688 - DNA, 16 bp, synthetic construct
  misc_feature 1..16: note = synthetic [barcode part1]
  source 1..16: mol_type = other DNA
tgcctggagaggttag

SEQ ID NO: 44689 - DNA, 16 bp, synthetic construct
  misc_feature 1..16: note = synthetic [barcode part1]
  source 1..16: mol_type = other DNA
aattcaagaagacgcc

SEQ ID NO: 44690 - DNA, 16 bp, synthetic construct
  misc_feature 1..16: note = synthetic [barcode part1]
  source 1..16: mol_type = other DNA
gtgagtccaacggagt

SEQ ID NO: 44691 - DNA, 16 bp, synthetic construct
  misc_feature 1..16: note = synthetic [barcode part1]
  source 1..16: mol_type = other DNA
taatcgcgtgattgcg

SEQ ID NO: 44692 - DNA, 16 bp, synthetic construct
  misc_feature 1..16: note = synthetic [barcode part1]
  source 1..16: mol_type = other DNA
tagtattggcaggtag

SEQ ID NO: 44693 - DNA, 16 bp, synthetic construct
  misc_feature 1..16: note = synthetic [barcode part1]
  source 1..16: mol_type = other DNA
cgtatctgtcctcact

SEQ ID NO: 44694 - DNA, 16 bp, synthetic construct
  misc_feature 1..16: note = synthetic [barcode part1]
  source 1..16: mol_type = other DNA
accttgtcagattcgt

SEQ ID NO: 44695 - DNA, 16 bp, synthetic construct
  misc_feature 1..16: note = synthetic [barcode part1]
  source 1..16: mol_type = other DNA
ttcctatcgaatcgtg

SEQ ID NO: 44696 - DNA, 16 bp, synthetic construct
  misc_feature 1..16: note = synthetic [barcode part1]
  source 1..16: mol_type = other DNA
ccacagaagacgttct

SEQ ID NO: 44697 - DNA, 16 bp, synthetic construct
  misc_feature 1..16: note = synthetic [barcode part1]
  source 1..16: mol_type = other DNA
atcgatagacggtagt

SEQ ID NO: 44698 - DNA, 16 bp, synthetic construct
  misc_feature 1..16: note = synthetic [barcode part1]
  source 1..16: mol_type = other DNA
gtcagattgtcaggtc

SEQ ID NO: 44699 - DNA, 16 bp, synthetic construct
  misc_feature 1..16: note = synthetic [barcode part1]
  source 1..16: mol_type = other DNA
cgagactacgttgtgt

SEQ ID NO: 44700 - DNA, 16 bp, synthetic construct
  misc_feature 1..16: note = synthetic [barcode part1]
  source 1..16: mol_type = other DNA
aggcctgaatacactc

SEQ ID NO: 44701 - DNA, 16 bp, synthetic construct
  misc_feature 1..16: note = synthetic [barcode part1]
  source 1..16: mol_type = other DNA
ccttagactacttacg

SEQ ID NO: 44702 - DNA, 16 bp, synthetic construct
  misc_feature 1..16: note = synthetic [barcode part1]
  source 1..16: mol_type = other DNA
accgcgtctcttaacg

SEQ ID NO: 44703 - DNA, 16 bp, synthetic construct
  misc_feature 1..16: note = synthetic [barcode part1]
  source 1..16: mol_type = other DNA
cgagaagattggtgcc

SEQ ID NO: 44704 - DNA, 16 bp, synthetic construct
  misc_feature 1..16: note = synthetic [barcode part1]
  source 1..16: mol_type = other DNA
gtgttaagtgtggcct

SEQ ID NO: 44705 - DNA, 16 bp, synthetic construct
  misc_feature 1..16: note = synthetic [barcode part1]
  source 1..16: mol_type = other DNA
tgtgacactgcagtac

SEQ ID NO: 44706 - DNA, 16 bp, synthetic construct
  misc_feature 1..16: note = synthetic [barcode part1]
  source 1..16: mol_type = other DNA
tacaccaggagagtcg

SEQ ID NO: 44707 - DNA, 16 bp, synthetic construct
  misc_feature 1..16: note = synthetic [barcode part1]
  source 1..16: mol_type = other DNA
cgtatagagtaacgac

SEQ ID NO: 44708 - DNA, 16 bp, synthetic construct
  misc_feature 1..16: note = synthetic [barcode part1]
  source 1..16: mol_type = other DNA
ttgtcgttcgtagact

SEQ ID NO: 44709 - DNA, 16 bp, synthetic construct
  misc_feature 1..16: note = synthetic [barcode part1]
  source 1..16: mol_type = other DNA
atcggcgtgaggaatc

SEQ ID NO: 44710 - DNA, 16 bp, synthetic construct
  misc_feature 1..16: note = synthetic [barcode part1]
  source 1..16: mol_type = other DNA
aggcctatagactcgt

SEQ ID NO: 44711 - DNA, 16 bp, synthetic construct
  misc_feature 1..16: note = synthetic [barcode part1]
  source 1..16: mol_type = other DNA
cactaagtctggcaac

SEQ ID NO: 44712 - DNA, 16 bp, synthetic construct
  misc_feature 1..16: note = synthetic [barcode part1]
  source 1..16: mol_type = other DNA
tattctccggtggtcg

SEQ ID NO: 44713 - DNA, 16 bp, synthetic construct
  misc_feature 1..16: note = synthetic [barcode part1]
  source 1..16: mol_type = other DNA
atacggtccgaaggac

SEQ ID NO: 44714 - DNA, 16 bp, synthetic construct
  misc_feature 1..16: note = synthetic [barcode part1]
  source 1..16: mol_type = other DNA
gcgtcacgaatagacg

SEQ ID NO: 44715 - DNA, 16 bp, synthetic construct
  misc_feature 1..16: note = synthetic [barcode part1]
  source 1..16: mol_type = other DNA
gcctatatcttcaacg

SEQ ID NO: 44716 - DNA, 16 bp, synthetic construct
  misc_feature 1..16: note = synthetic [barcode part1]
  source 1..16: mol_type = other DNA
cctgaccgtgccaatt

SEQ ID NO: 44717 - DNA, 16 bp, synthetic construct
  misc_feature 1..16: note = synthetic [barcode part1]
  source 1..16: mol_type = other DNA
ccttgtcagtagagtg

SEQ ID NO: 44718 - DNA, 16 bp, synthetic construct
  misc_feature 1..16: note = synthetic [barcode part1]
  source 1..16: mol_type = other DNA
tctcaactcgagtact

SEQ ID NO: 44719 - DNA, 16 bp, synthetic construct
  misc_feature 1..16: note = synthetic [barcode part1]
  source 1..16: mol_type = other DNA
cgtgtgagaacgttct

SEQ ID NO: 44720 - DNA, 16 bp, synthetic construct
  misc_feature 1..16: note = synthetic [barcode part1]
  source 1..16: mol_type = other DNA
cgtgtcgattgtgtag

SEQ ID NO: 44721 - DNA, 16 bp, synthetic construct
  misc_feature 1..16: note = synthetic [barcode part1]
  source 1..16: mol_type = other DNA
agtgttgagtctcgac

SEQ ID NO: 44722 - DNA, 16 bp, synthetic construct
  misc_feature 1..16: note = synthetic [barcode part1]
  source 1..16: mol_type = other DNA
gtcggatccacactct

SEQ ID NO: 44723 - DNA, 16 bp, synthetic construct
  misc_feature 1..16: note = synthetic [barcode part1]
  source 1..16: mol_type = other DNA
ttcgtgcaacttaacc

SEQ ID NO: 44724 - DNA, 16 bp, synthetic construct
  misc_feature 1..16: note = synthetic [barcode part1]
  source 1..16: mol_type = other DNA
gcgaagacaacctgac

SEQ ID NO: 44725 - DNA, 16 bp, synthetic construct
  misc_feature 1..16: note = synthetic [barcode part1]
  source 1..16: mol_type = other DNA
gattctgtattcaccg

SEQ ID NO: 44726 - DNA, 16 bp, synthetic construct
  misc_feature 1..16: note = synthetic [barcode part1]
  source 1..16: mol_type = other DNA
agacactgtggacttc

SEQ ID NO: 44727 - DNA, 16 bp, synthetic construct
  misc_feature 1..16: note = synthetic [barcode part1]
  source 1..16: mol_type = other DNA
gtcttagtcctccttg

SEQ ID NO: 44728 - DNA, 16 bp, synthetic construct
  misc_feature 1..16: note = synthetic [barcode part1]
  source 1..16: mol_type = other DNA
acttcgactgaccaag

SEQ ID NO: 44729 - DNA, 16 bp, synthetic construct
  misc_feature 1..16: note = synthetic [barcode part1]
  source 1..16: mol_type = other DNA
gtcaatctccttcctg

SEQ ID NO: 44730 - DNA, 16 bp, synthetic construct
  misc_feature 1..16: note = synthetic [barcode part1]
  source 1..16: mol_type = other DNA
tgagtatcgtgccagt

SEQ ID NO: 44731 - DNA, 16 bp, synthetic construct
  misc_feature 1..16: note = synthetic [barcode part1]
  source 1..16: mol_type = other DNA
ttgaacgtctaggtgc

SEQ ID NO: 44732 - DNA, 16 bp, synthetic construct
  misc_feature 1..16: note = synthetic [barcode part1]
  source 1..16: mol_type = other DNA
gtgttgactggatacc

SEQ ID NO: 44733 - DNA, 16 bp, synthetic construct
  misc_feature 1..16: note = synthetic [barcode part1]
  source 1..16: mol_type = other DNA
tactcgcgaacagatc

SEQ ID NO: 44734 - DNA, 16 bp, synthetic construct
  misc_feature 1..16: note = synthetic [barcode part1]
  source 1..16: mol_type = other DNA
taggtaacactacgag

SEQ ID NO: 44735 - DNA, 16 bp, synthetic construct
  misc_feature 1..16: note = synthetic [barcode part1]
  source 1..16: mol_type = other DNA
ccgacttcaagaagtc

SEQ ID NO: 44736 - DNA, 16 bp, synthetic construct
  misc_feature 1..16: note = synthetic [barcode part1]
  source 1..16: mol_type = other DNA
accaggttgccgaatt

SEQ ID NO: 44737 - DNA, 16 bp, synthetic construct
  misc_feature 1..16: note = synthetic [barcode part1]
  source 1..16: mol_type = other DNA
agaatacgcacctctg

SEQ ID NO: 44738 - DNA, 16 bp, synthetic construct
  misc_feature 1..16: note = synthetic [barcode part1]
  source 1..16: mol_type = other DNA
caagacgcggacttag

SEQ ID NO: 44739 - DNA, 16 bp, synthetic construct
  misc_feature 1..16: note = synthetic [barcode part1]
  source 1..16: mol_type = other DNA
accagttggaatcctg

SEQ ID NO: 44740 - DNA, 16 bp, synthetic construct
  misc_feature 1..16: note = synthetic [barcode part1]
  source 1..16: mol_type = other DNA
ccaagagtgtagaccg

SEQ ID NO: 44741 - DNA, 16 bp, synthetic construct
  misc_feature 1..16: note = synthetic [barcode part1]
  source 1..16: mol_type = other DNA
cctgcgaatagatctg

SEQ ID NO: 44742 - DNA, 16 bp, synthetic construct
  misc_feature 1..16: note = synthetic [barcode part1]
  source 1..16: mol_type = other DNA
aggacttctcgcctac

SEQ ID NO: 44743 - DNA, 16 bp, synthetic construct
  misc_feature 1..16: note = synthetic [barcode part1]
  source 1..16: mol_type = other DNA
ttaaccggattggtcg

SEQ ID NO: 44744 - DNA, 16 bp, synthetic construct
  misc_feature 1..16: note = synthetic [barcode part1]
  source 1..16: mol_type = other DNA
tgttaccgacgtgcct

SEQ ID NO: 44745 - DNA, 16 bp, synthetic construct
  misc_feature 1..16: note = synthetic [barcode part1]
  source 1..16: mol_type = other DNA
tctattcggtatcgtg

SEQ ID NO: 44746 - DNA, 16 bp, synthetic construct
  misc_feature 1..16: note = synthetic [barcode part1]
  source 1..16: mol_type = other DNA
gactcggcaataactc

SEQ ID NO: 44747 - DNA, 16 bp, synthetic construct
  misc_feature 1..16: note = synthetic [barcode part1]
  source 1..16: mol_type = other DNA
tgaacacgatctgcac

SEQ ID NO: 44748 - DNA, 16 bp, synthetic construct
  misc_feature 1..16: note = synthetic [barcode part1]
  source 1..16: mol_type = other DNA
cctaggagtgcgtatt

SEQ ID NO: 44749 - DNA, 16 bp, synthetic construct
  misc_feature 1..16: note = synthetic [barcode part1]
  source 1..16: mol_type = other DNA
aatatactctctcggc

SEQ ID NO: 44750 - DNA, 16 bp, synthetic construct
  misc_feature 1..16: note = synthetic [barcode part1]
  source 1..16: mol_type = other DNA
tccttatcgccgagtg

SEQ ID NO: 44751 - DNA, 16 bp, synthetic construct
  misc_feature 1..16: note = synthetic [barcode part1]
  source 1..16: mol_type = other DNA
gtctgttaggttctgt

SEQ ID NO: 44752 - DNA, 16 bp, synthetic construct
  misc_feature 1..16: note = synthetic [barcode part1]
  source 1..16: mol_type = other DNA
ttctatcgcctcactg

SEQ ID NO: 44753 - DNA, 16 bp, synthetic construct
  misc_feature 1..16: note = synthetic [barcode part1]
  source 1..16: mol_type = other DNA
atagaacgtgaatccg

SEQ ID NO: 44754 - DNA, 16 bp, synthetic construct
  misc_feature 1..16: note = synthetic [barcode part1]
  source 1..16: mol_type = other DNA
gcaattggattggaac

SEQ ID NO: 44755 - DNA, 16 bp, synthetic construct
  misc_feature 1..16: note = synthetic [barcode part1]
  source 1..16: mol_type = other DNA
cctatcgttaacacac

SEQ ID NO: 44756 - DNA, 16 bp, synthetic construct
  misc_feature 1..16: note = synthetic [barcode part1]
  source 1..16: mol_type = other DNA
actacgtctgagtgtg

SEQ ID NO: 44757 - DNA, 16 bp, synthetic construct
  misc_feature 1..16: note = synthetic [barcode part1]
  source 1..16: mol_type = other DNA
gcgatatcagttgacc

SEQ ID NO: 44758 - DNA, 16 bp, synthetic construct
  misc_feature 1..16: note = synthetic [barcode part1]
  source 1..16: mol_type = other DNA
tgattgcgacgataag

SEQ ID NO: 44759 - DNA, 16 bp, synthetic construct
  misc_feature 1..16: note = synthetic [barcode part1]
  source 1..16: mol_type = other DNA
agtattggaccggtct

SEQ ID NO: 44760 - DNA, 16 bp, synthetic construct
  misc_feature 1..16: note = synthetic [barcode part1]
  source 1..16: mol_type = other DNA
tccgcagagtaagacg

SEQ ID NO: 44761 - DNA, 16 bp, synthetic construct
  misc_feature 1..16: note = synthetic [barcode part1]
  source 1..16: mol_type = other DNA
tggtgaccaactcagt

SEQ ID NO: 44762 - DNA, 16 bp, synthetic construct
  misc_feature 1..16: note = synthetic [barcode part1]
  source 1..16: mol_type = other DNA
agttcgacctcgtgtc

SEQ ID NO: 44763 - DNA, 16 bp, synthetic construct
  misc_feature 1..16: note = synthetic [barcode part1]
  source 1..16: mol_type = other DNA
aggaattcagtgtacg

SEQ ID NO: 44764 - DNA, 16 bp, synthetic construct
  misc_feature 1..16: note = synthetic [barcode part1]
  source 1..16: mol_type = other DNA
aggtaagtgtccacct

SEQ ID NO: 44765 - DNA, 16 bp, synthetic construct
  misc_feature 1..16: note = synthetic [barcode part1]
  source 1..16: mol_type = other DNA
aagaccggcgtgattg

SEQ ID NO: 44766 - DNA, 16 bp, synthetic construct
  misc_feature 1..16: note = synthetic [barcode part1]
  source 1..16: mol_type = other DNA
caggaagtgcgtagtc

SEQ ID NO: 44767 - DNA, 16 bp, synthetic construct
  misc_feature 1..16: note = synthetic [barcode part1]
  source 1..16: mol_type = other DNA
ttccacagactcgatt

SEQ ID NO: 44768 - DNA, 16 bp, synthetic construct
  misc_feature 1..16: note = synthetic [barcode part1]
  source 1..16: mol_type = other DNA
gagttcggatacgtct

SEQ ID NO: 44769 - DNA, 16 bp, synthetic construct
  misc_feature 1..16: note = synthetic [barcode part1]
  source 1..16: mol_type = other DNA
tcggattatcagaccg

SEQ ID NO: 44770 - DNA, 16 bp, synthetic construct
  misc_feature 1..16: note = synthetic [barcode part1]
  source 1..16: mol_type = other DNA
tatccgcgcagtatcc

SEQ ID NO: 44771 - DNA, 16 bp, synthetic construct
  misc_feature 1..16: note = synthetic [barcode part1]
  source 1..16: mol_type = other DNA
ttgccacgaacctacc

SEQ ID NO: 44772 - DNA, 16 bp, synthetic construct
  misc_feature 1..16: note = synthetic [barcode part1]
  source 1..16: mol_type = other DNA
aatattcctatcgccg

SEQ ID NO: 44773 - DNA, 16 bp, synthetic construct
  misc_feature 1..16: note = synthetic [barcode part1]
  source 1..16: mol_type = other DNA
gcagttgaagattggt

SEQ ID NO: 44774 - DNA, 16 bp, synthetic construct
  misc_feature 1..16: note = synthetic [barcode part1]
  source 1..16: mol_type = other DNA
tccacactgacagtcc

SEQ ID NO: 44775 - DNA, 16 bp, synthetic construct
  misc_feature 1..16: note = synthetic [barcode part1]
  source 1..16: mol_type = other DNA
aacggtgagattcgcg

SEQ ID NO: 44776 - DNA, 16 bp, synthetic construct
  misc_feature 1..16: note = synthetic [barcode part1]
  source 1..16: mol_type = other DNA
taagaggtacgtggtt

SEQ ID NO: 44777 - DNA, 16 bp, synthetic construct
  misc_feature 1..16: note = synthetic [barcode part1]
  source 1..16: mol_type = other DNA
gttctgtgtctcctgt

SEQ ID NO: 44778 - DNA, 16 bp, synthetic construct
  misc_feature 1..16: note = synthetic [barcode part1]
  source 1..16: mol_type = other DNA
aagaagtcaggaggtc

SEQ ID NO: 44779 - DNA, 16 bp, synthetic construct
  misc_feature 1..16: note = synthetic [barcode part1]
  source 1..16: mol_type = other DNA
agaaccggttaggaag

SEQ ID NO: 44780 - DNA, 16 bp, synthetic construct
  misc_feature 1..16: note = synthetic [barcode part1]
  source 1..16: mol_type = other DNA
ccagatacttgaacgc

SEQ ID NO: 44781 - DNA, 16 bp, synthetic construct
  misc_feature 1..16: note = synthetic [barcode part1]
  source 1..16: mol_type = other DNA
acaatccgtggagacg

SEQ ID NO: 44782 - DNA, 16 bp, synthetic construct
  misc_feature 1..16: note = synthetic [barcode part1]
  source 1..16: mol_type = other DNA
cgttgtaaggagagag

SEQ ID NO: 44783 - DNA, 16 bp, synthetic construct
  misc_feature 1..16: note = synthetic [barcode part1]
  source 1..16: mol_type = other DNA
gcaagttgcgtaatcc

SEQ ID NO: 44784 - DNA, 16 bp, synthetic construct
  misc_feature 1..16: note = synthetic [barcode part1]
  source 1..16: mol_type = other DNA
ccaggatctattcgtt

SEQ ID NO: 44785 - DNA, 16 bp, synthetic construct
  misc_feature 1..16: note = synthetic [barcode part1]
  source 1..16: mol_type = other DNA
tcctgtctcacagacg

SEQ ID NO: 44786 - DNA, 16 bp, synthetic construct
  misc_feature 1..16: note = synthetic [barcode part1]
  source 1..16: mol_type = other DNA
cacacaactgtgtgac

SEQ ID NO: 44787 - DNA, 16 bp, synthetic construct
  misc_feature 1..16: note = synthetic [barcode part1]
  source 1..16: mol_type = other DNA
acctagactaccttac

SEQ ID NO: 44788 - DNA, 16 bp, synthetic construct
  misc_feature 1..16: note = synthetic [barcode part1]
  source 1..16: mol_type = other DNA
cggtccttcaacttct

SEQ ID NO: 44789 - DNA, 16 bp, synthetic construct
  misc_feature 1..16: note = synthetic [barcode part1]
  source 1..16: mol_type = other DNA
gtgttcttgcactcct

SEQ ID NO: 44790 - DNA, 16 bp, synthetic construct
  misc_feature 1..16: note = synthetic [barcode part1]
  source 1..16: mol_type = other DNA
ttaacgactcgacggt

SEQ ID NO: 44791 - DNA, 16 bp, synthetic construct
  misc_feature 1..16: note = synthetic [barcode part1]
  source 1..16: mol_type = other DNA
tcctctcagagtctct

SEQ ID NO: 44792 - DNA, 16 bp, synthetic construct
  misc_feature 1..16: note = synthetic [barcode part1]
  source 1..16: mol_type = other DNA
tgcgtccggtagtctt

SEQ ID NO: 44793 - DNA, 16 bp, synthetic construct
  misc_feature 1..16: note = synthetic [barcode part1]
  source 1..16: mol_type = other DNA
acacctctcttgtgtc

SEQ ID NO: 44794 - DNA, 16 bp, synthetic construct
  misc_feature 1..16: note = synthetic [barcode part1]
  source 1..16: mol_type = other DNA
tacaaccggttcgtag

SEQ ID NO: 44795 - DNA, 16 bp, synthetic construct
  misc_feature 1..16: note = synthetic [barcode part1]
  source 1..16: mol_type = other DNA
tgcagtgacagatagt

SEQ ID NO: 44796 - DNA, 16 bp, synthetic construct
  misc_feature 1..16: note = synthetic [barcode part1]
  source 1..16: mol_type = other DNA
agaataggcagacttc

SEQ ID NO: 44797 - DNA, 16 bp, synthetic construct
  misc_feature 1..16: note = synthetic [barcode part1]
  source 1..16: mol_type = other DNA
cacaggcaagtaatac

SEQ ID NO: 44798 - DNA, 16 bp, synthetic construct
  misc_feature 1..16: note = synthetic [barcode part1]
  source 1..16: mol_type = other DNA
tcagtagtgttaggcc

SEQ ID NO: 44799 - DNA, 16 bp, synthetic construct
  misc_feature 1..16: note = synthetic [barcode part1]
  source 1..16: mol_type = other DNA
gtgttactaggcggag

SEQ ID NO: 44800 - DNA, 16 bp, synthetic construct
  misc_feature 1..16: note = synthetic [barcode part1]
  source 1..16: mol_type = other DNA
acgtgagaggtcgttg

SEQ ID NO: 44801 - DNA, 16 bp, synthetic construct
  misc_feature 1..16: note = synthetic [barcode part1]
  source 1..16: mol_type = other DNA
atccgtcgcaagtaac

SEQ ID NO: 44802 - DNA, 16 bp, synthetic construct
  misc_feature 1..16: note = synthetic [barcode part1]
  source 1..16: mol_type = other DNA
cctacaacactattcg

SEQ ID NO: 44803 - DNA, 16 bp, synthetic construct
  misc_feature 1..16: note = synthetic [barcode part1]
  source 1..16: mol_type = other DNA
gttagaccgaactgtc

SEQ ID NO: 44804 - DNA, 16 bp, synthetic construct
  misc_feature 1..16: note = synthetic [barcode part1]
  source 1..16: mol_type = other DNA
tgaggtcaggatcctt

SEQ ID NO: 44805 - DNA, 16 bp, synthetic construct
  misc_feature 1..16: note = synthetic [barcode part1]
  source 1..16: mol_type = other DNA
agtgaatctactcgcg

SEQ ID NO: 44806 - DNA, 16 bp, synthetic construct
  misc_feature 1..16: note = synthetic [barcode part1]
  source 1..16: mol_type = other DNA
tggtctaattcctgtg

SEQ ID NO: 44807 - DNA, 16 bp, synthetic construct
  misc_feature 1..16: note = synthetic [barcode part1]
  source 1..16: mol_type = other DNA
tatctaacgactcctg

SEQ ID NO: 44808 - DNA, 16 bp, synthetic construct
  misc_feature 1..16: note = synthetic [barcode part1]
  source 1..16: mol_type = other DNA
actagaaggccaagag

SEQ ID NO: 44809 - DNA, 16 bp, synthetic construct
  misc_feature 1..16: note = synthetic [barcode part1]
  source 1..16: mol_type = other DNA
cactcacgttcacttc

SEQ ID NO: 44810 - DNA, 16 bp, synthetic construct
  misc_feature 1..16: note = synthetic [barcode part1]
  source 1..16: mol_type = other DNA
cctaaggattggtcgt

SEQ ID NO: 44811 - DNA, 16 bp, synthetic construct
  misc_feature 1..16: note = synthetic [barcode part1]
  source 1..16: mol_type = other DNA
cacacggtgaaggatc

SEQ ID NO: 44812 - DNA, 16 bp, synthetic construct
  misc_feature 1..16: note = synthetic [barcode part1]
  source 1..16: mol_type = other DNA
taagactctgaggcct

SEQ ID NO: 44813 - DNA, 16 bp, synthetic construct
  misc_feature 1..16: note = synthetic [barcode part1]
  source 1..16: mol_type = other DNA
accggatcttaacggt

SEQ ID NO: 44814 - DNA, 16 bp, synthetic construct
  misc_feature 1..16: note = synthetic [barcode part1]
  source 1..16: mol_type = other DNA
acagacttcaggtgtc

SEQ ID NO: 44815 - DNA, 16 bp, synthetic construct
  misc_feature 1..16: note = synthetic [barcode part1]
  source 1..16: mol_type = other DNA
tatacctcaggagtgc

SEQ ID NO: 44816 - DNA, 16 bp, synthetic construct
  misc_feature 1..16: note = synthetic [barcode part1]
  source 1..16: mol_type = other DNA
ttcaactacgccgacc

SEQ ID NO: 44817 - DNA, 16 bp, synthetic construct
  misc_feature 1..16: note = synthetic [barcode part1]
  source 1..16: mol_type = other DNA
gccagacgtgagaatc

SEQ ID NO: 44818 - DNA, 16 bp, synthetic construct
  misc_feature 1..16: note = synthetic [barcode part1]
  source 1..16: mol_type = other DNA
agtgtcgttccagagt

SEQ ID NO: 44819 - DNA, 16 bp, synthetic construct
  misc_feature 1..16: note = synthetic [barcode part1]
  source 1..16: mol_type = other DNA
attgcgaactccgaac

SEQ ID NO: 44820 - DNA, 16 bp, synthetic construct
  misc_feature 1..16: note = synthetic [barcode part1]
  source 1..16: mol_type = other DNA
tgtcggagatagtcct

SEQ ID NO: 44821 - DNA, 16 bp, synthetic construct
  misc_feature 1..16: note = synthetic [barcode part1]
  source 1..16: mol_type = other DNA
ccgcggagatatactt

SEQ ID NO: 44822 - DNA, 16 bp, synthetic construct
  misc_feature 1..16: note = synthetic [barcode part1]
  source 1..16: mol_type = other DNA
cctaacactacacttg

SEQ ID NO: 44823 - DNA, 16 bp, synthetic construct
  misc_feature 1..16: note = synthetic [barcode part1]
  source 1..16: mol_type = other DNA
agagtggtcacaggtc

SEQ ID NO: 44824 - DNA, 16 bp, synthetic construct
  misc_feature 1..16: note = synthetic [barcode part1]
  source 1..16: mol_type = other DNA
ttggacgtaagacagt

SEQ ID NO: 44825 - DNA, 16 bp, synthetic construct
  misc_feature 1..16: note = synthetic [barcode part1]
  source 1..16: mol_type = other DNA
ttacgttctaccagac

SEQ ID NO: 44826 - DNA, 16 bp, synthetic construct
  misc_feature 1..16: note = synthetic [barcode part1]
  source 1..16: mol_type = other DNA
aggtgtgaccaggttg

SEQ ID NO: 44827 - DNA, 16 bp, synthetic construct
  misc_feature 1..16: note = synthetic [barcode part1]
  source 1..16: mol_type = other DNA
acttggaggtaagatc

SEQ ID NO: 44828 - DNA, 16 bp, synthetic construct
  misc_feature 1..16: note = synthetic [barcode part1]
  source 1..16: mol_type = other DNA
agtgtgtggttcctcc

SEQ ID NO: 44829 - DNA, 16 bp, synthetic construct
  misc_feature 1..16: note = synthetic [barcode part1]
  source 1..16: mol_type = other DNA
cctaacacgagttacg

SEQ ID NO: 44830 - DNA, 16 bp, synthetic construct
  misc_feature 1..16: note = synthetic [barcode part1]
  source 1..16: mol_type = other DNA
taggccactctcgtgt

SEQ ID NO: 44831 - DNA, 16 bp, synthetic construct
  misc_feature 1..16: note = synthetic [barcode part1]
  source 1..16: mol_type = other DNA
aacttgccactattcg

SEQ ID NO: 44832 - DNA, 16 bp, synthetic construct
  misc_feature 1..16: note = synthetic [barcode part1]
  source 1..16: mol_type = other DNA
attgacaggtacgcct

SEQ ID NO: 44833 - DNA, 16 bp, synthetic construct
  misc_feature 1..16: note = synthetic [barcode part1]
  source 1..16: mol_type = other DNA
cagacacgtacgactt

SEQ ID NO: 44834 - DNA, 16 bp, synthetic construct
  misc_feature 1..16: note = synthetic [barcode part1]
  source 1..16: mol_type = other DNA
caggattatcaaccgc

SEQ ID NO: 44835 - DNA, 16 bp, synthetic construct
  misc_feature 1..16: note = synthetic [barcode part1]
  source 1..16: mol_type = other DNA
ccaatagagtacagac

SEQ ID NO: 44836 - DNA, 16 bp, synthetic construct
  misc_feature 1..16: note = synthetic [barcode part1]
  source 1..16: mol_type = other DNA
caatcgtcgagagacg

SEQ ID NO: 44837 - DNA, 16 bp, synthetic construct
  misc_feature 1..16: note = synthetic [barcode part1]
  source 1..16: mol_type = other DNA
ttgacttccacgtggc

SEQ ID NO: 44838 - DNA, 16 bp, synthetic construct
  misc_feature 1..16: note = synthetic [barcode part1]
  source 1..16: mol_type = other DNA
accaagtctgtatctc

SEQ ID NO: 44839 - DNA, 16 bp, synthetic construct
  misc_feature 1..16: note = synthetic [barcode part1]
  source 1..16: mol_type = other DNA
taactggtctcggaac

SEQ ID NO: 44840 - DNA, 16 bp, synthetic construct
  misc_feature 1..16: note = synthetic [barcode part1]
  source 1..16: mol_type = other DNA
ttgaggtaacgttgcc

SEQ ID NO: 44841 - DNA, 16 bp, synthetic construct
  misc_feature 1..16: note = synthetic [barcode part1]
  source 1..16: mol_type = other DNA
ttcactaaccgccttc

SEQ ID NO: 44842 - DNA, 16 bp, synthetic construct
  misc_feature 1..16: note = synthetic [barcode part1]
  source 1..16: mol_type = other DNA
tggaacttgatcgacc

SEQ ID NO: 44843 - DNA, 16 bp, synthetic construct
  misc_feature 1..16: note = synthetic [barcode part1]
  source 1..16: mol_type = other DNA
ttgttcaaggttctgc

SEQ ID NO: 44844 - DNA, 16 bp, synthetic construct
  misc_feature 1..16: note = synthetic [barcode part1]
  source 1..16: mol_type = other DNA
gtatagacggattacg

SEQ ID NO: 44845 - DNA, 16 bp, synthetic construct
  misc_feature 1..16: note = synthetic [barcode part1]
  source 1..16: mol_type = other DNA
gcacttaagacttgcg

SEQ ID NO: 44846 - DNA, 16 bp, synthetic construct
  misc_feature 1..16: note = synthetic [barcode part1]
  source 1..16: mol_type = other DNA
atatcctgaccgttac

SEQ ID NO: 44847 - DNA, 16 bp, synthetic construct
  misc_feature 1..16: note = synthetic [barcode part1]
  source 1..16: mol_type = other DNA
tccgaccaatcctctt

SEQ ID NO: 44848 - DNA, 16 bp, synthetic construct
  misc_feature 1..16: note = synthetic [barcode part1]
  source 1..16: mol_type = other DNA
tgtctgtgtggtgcct

SEQ ID NO: 44849 - DNA, 16 bp, synthetic construct
  misc_feature 1..16: note = synthetic [barcode part1]
  source 1..16: mol_type = other DNA
gttccgtcaagttcgc

SEQ ID NO: 44850 - DNA, 16 bp, synthetic construct
  misc_feature 1..16: note = synthetic [barcode part1]
  source 1..16: mol_type = other DNA
gtctagacacttggac

SEQ ID NO: 44851 - DNA, 16 bp, synthetic construct
  misc_feature 1..16: note = synthetic [barcode part1]
  source 1..16: mol_type = other DNA
tattgtacgacgccag

SEQ ID NO: 44852 - DNA, 16 bp, synthetic construct
  misc_feature 1..16: note = synthetic [barcode part1]
  source 1..16: mol_type = other DNA
ttcctctctggtcaac

SEQ ID NO: 44853 - DNA, 16 bp, synthetic construct
  misc_feature 1..16: note = synthetic [barcode part1]
  source 1..16: mol_type = other DNA
tgcaggagattcgacg

SEQ ID NO: 44854 - DNA, 16 bp, synthetic construct
  misc_feature 1..16: note = synthetic [barcode part1]
  source 1..16: mol_type = other DNA
aacgacggtctataag

SEQ ID NO: 44855 - DNA, 16 bp, synthetic construct
  misc_feature 1..16: note = synthetic [barcode part1]
  source 1..16: mol_type = other DNA
gccttaccagaagatc

SEQ ID NO: 44856 - DNA, 16 bp, synthetic construct
  misc_feature 1..16: note = synthetic [barcode part1]
  source 1..16: mol_type = other DNA
gaactgcgaacgtggt

SEQ ID NO: 44857 - DNA, 16 bp, synthetic construct
  misc_feature 1..16: note = synthetic [barcode part1]
  source 1..16: mol_type = other DNA
tggaactaactctggc

SEQ ID NO: 44858 - DNA, 16 bp, synthetic construct
  misc_feature 1..16: note = synthetic [barcode part1]
  source 1..16: mol_type = other DNA
agtctaggaggacacc

SEQ ID NO: 44859 - DNA, 16 bp, synthetic construct
  misc_feature 1..16: note = synthetic [barcode part1]
  source 1..16: mol_type = other DNA
tccggttaccaatatc

SEQ ID NO: 44860 - DNA, 16 bp, synthetic construct
  misc_feature 1..16: note = synthetic [barcode part1]
  source 1..16: mol_type = other DNA
cagacttcgaagtaag

SEQ ID NO: 44861 - DNA, 16 bp, synthetic construct
  misc_feature 1..16: note = synthetic [barcode part1]
  source 1..16: mol_type = other DNA
gtgtgaccaacgtact

SEQ ID NO: 44862 - DNA, 16 bp, synthetic construct
  misc_feature 1..16: note = synthetic [barcode part1]
  source 1..16: mol_type = other DNA
cactaagacctgacac

SEQ ID NO: 44863 - DNA, 16 bp, synthetic construct
  misc_feature 1..16: note = synthetic [barcode part1]
  source 1..16: mol_type = other DNA
taccgaatctagtggc

SEQ ID NO: 44864 - DNA, 16 bp, synthetic construct
  misc_feature 1..16: note = synthetic [barcode part1]
  source 1..16: mol_type = other DNA
tcacaacactgtggtg

SEQ ID NO: 44865 - DNA, 16 bp, synthetic construct
  misc_feature 1..16: note = synthetic [barcode part1]
  source 1..16: mol_type = other DNA
ttgaccttcgtacagt

SEQ ID NO: 44866 - DNA, 16 bp, synthetic construct
  misc_feature 1..16: note = synthetic [barcode part1]
  source 1..16: mol_type = other DNA
ttgtgacgactaaccg

SEQ ID NO: 44867 - DNA, 16 bp, synthetic construct
  misc_feature 1..16: note = synthetic [barcode part1]
  source 1..16: mol_type = other DNA
acttattccgcggcgt

SEQ ID NO: 44868 - DNA, 16 bp, synthetic construct
  misc_feature 1..16: note = synthetic [barcode part1]
  source 1..16: mol_type = other DNA
cctgttctaccgtgag

SEQ ID NO: 44869 - DNA, 16 bp, synthetic construct
  misc_feature 1..16: note = synthetic [barcode part1]
  source 1..16: mol_type = other DNA
cctggtctgatcgtgt

SEQ ID NO: 44870 - DNA, 16 bp, synthetic construct
  misc_feature 1..16: note = synthetic [barcode part1]
  source 1..16: mol_type = other DNA
acgttctgactcaact

SEQ ID NO: 44871 - DNA, 16 bp, synthetic construct
  misc_feature 1..16: note = synthetic [barcode part1]
  source 1..16: mol_type = other DNA
acgagttcttcactac

SEQ ID NO: 44872 - DNA, 16 bp, synthetic construct
  misc_feature 1..16: note = synthetic [barcode part1]
  source 1..16: mol_type = other DNA
tcttcagtaatcgcgt

SEQ ID NO: 44873 - DNA, 16 bp, synthetic construct
  misc_feature 1..16: note = synthetic [barcode part1]
  source 1..16: mol_type = other DNA
aatccgttgagtaccg

SEQ ID NO: 44874 - DNA, 16 bp, synthetic construct
  misc_feature 1..16: note = synthetic [barcode part1]
  source 1..16: mol_type = other DNA
taggtgtcgattcttc

SEQ ID NO: 44875 - DNA, 16 bp, synthetic construct
  misc_feature 1..16: note = synthetic [barcode part1]
  source 1..16: mol_type = other DNA
caatacaggtctgcgt

SEQ ID NO: 44876 - DNA, 16 bp, synthetic construct
  misc_feature 1..16: note = synthetic [barcode part1]
  source 1..16: mol_type = other DNA
aggagtgcgaattgcc

SEQ ID NO: 44877 - DNA, 16 bp, synthetic construct
  misc_feature 1..16: note = synthetic [barcode part1]
  source 1..16: mol_type = other DNA
cgactattgttctacg

SEQ ID NO: 44878 - DNA, 16 bp, synthetic construct
  misc_feature 1..16: note = synthetic [barcode part1]
  source 1..16: mol_type = other DNA
ttccagtgacttacgt

SEQ ID NO: 44879 - DNA, 16 bp, synthetic construct
  misc_feature 1..16: note = synthetic [barcode part1]
  source 1..16: mol_type = other DNA
tacgatcctgacacag

SEQ ID NO: 44880 - DNA, 16 bp, synthetic construct
  misc_feature 1..16: note = synthetic [barcode part1]
  source 1..16: mol_type = other DNA
gtcgatacttgattcc

SEQ ID NO: 44881 - DNA, 16 bp, synthetic construct
  misc_feature 1..16: note = synthetic [barcode part1]
  source 1..16: mol_type = other DNA
ttgacaccaacacgtg

SEQ ID NO: 44882 - DNA, 16 bp, synthetic construct
  misc_feature 1..16: note = synthetic [barcode part1]
  source 1..16: mol_type = other DNA
tgagacggtcttctag

SEQ ID NO: 44883 - DNA, 16 bp, synthetic construct
  misc_feature 1..16: note = synthetic [barcode part1]
  source 1..16: mol_type = other DNA
agtcgatcgtaacacc

SEQ ID NO: 44884 - DNA, 16 bp, synthetic construct
  misc_feature 1..16: note = synthetic [barcode part1]
  source 1..16: mol_type = other DNA
acaacgtaccacagtc

SEQ ID NO: 44885 - DNA, 16 bp, synthetic construct
  misc_feature 1..16: note = synthetic [barcode part1]
  source 1..16: mol_type = other DNA
taccgttgacgcacct

SEQ ID NO: 44886 - DNA, 16 bp, synthetic construct
  misc_feature 1..16: note = synthetic [barcode part1]
  source 1..16: mol_type = other DNA
agtgcgacttgataag

SEQ ID NO: 44887 - DNA, 16 bp, synthetic construct
  misc_feature 1..16: note = synthetic [barcode part1]
  source 1..16: mol_type = other DNA
tctcacaatcggatct

SEQ ID NO: 44888 - DNA, 16 bp, synthetic construct
  misc_feature 1..16: note = synthetic [barcode part1]
  source 1..16: mol_type = other DNA
ttcaggttgccaacag

SEQ ID NO: 44889 - DNA, 16 bp, synthetic construct
  misc_feature 1..16: note = synthetic [barcode part1]
  source 1..16: mol_type = other DNA
cgtaagtgttcacgac

SEQ ID NO: 44890 - DNA, 16 bp, synthetic construct
  misc_feature 1..16: note = synthetic [barcode part1]
  source 1..16: mol_type = other DNA
ttcgactacacgccgt

SEQ ID NO: 44891 - DNA, 16 bp, synthetic construct
  misc_feature 1..16: note = synthetic [barcode part1]
  source 1..16: mol_type = other DNA
aatcttaccgttcacg

SEQ ID NO: 44892 - DNA, 16 bp, synthetic construct
  misc_feature 1..16: note = synthetic [barcode part1]
  source 1..16: mol_type = other DNA
gaattaggcgttaacg

SEQ ID NO: 44893 - DNA, 16 bp, synthetic construct
  misc_feature 1..16: note = synthetic [barcode part1]
  source 1..16: mol_type = other DNA
gacgatcctgacaact

SEQ ID NO: 44894 - DNA, 16 bp, synthetic construct
  misc_feature 1..16: note = synthetic [barcode part1]
  source 1..16: mol_type = other DNA
gaaggtctcctctaag

SEQ ID NO: 44895 - DNA, 16 bp, synthetic construct
  misc_feature 1..16: note = synthetic [barcode part1]
  source 1..16: mol_type = other DNA
actagtacaggaggtt

SEQ ID NO: 44896 - DNA, 16 bp, synthetic construct
  misc_feature 1..16: note = synthetic [barcode part1]
  source 1..16: mol_type = other DNA
gtggcggtatcgatag

SEQ ID NO: 44897 - DNA, 16 bp, synthetic construct
  misc_feature 1..16: note = synthetic [barcode part1]
  source 1..16: mol_type = other DNA
gtgcgtatacgacgtt

SEQ ID NO: 44898 - DNA, 16 bp, synthetic construct
  misc_feature 1..16: note = synthetic [barcode part1]
  source 1..16: mol_type = other DNA
accgtatccgatacag

SEQ ID NO: 44899 - DNA, 16 bp, synthetic construct
  misc_feature 1..16: note = synthetic [barcode part1]
  source 1..16: mol_type = other DNA
gatacgcagagaatct

SEQ ID NO: 44900 - DNA, 16 bp, synthetic construct
  misc_feature 1..16: note = synthetic [barcode part1]
  source 1..16: mol_type = other DNA
gccttaaggccttaag

SEQ ID NO: 44901 - DNA, 16 bp, synthetic construct
  misc_feature 1..16: note = synthetic [barcode part1]
  source 1..16: mol_type = other DNA
aacgtgcaatcctctt

SEQ ID NO: 44902 - DNA, 16 bp, synthetic construct
  misc_feature 1..16: note = synthetic [barcode part1]
  source 1..16: mol_type = other DNA
gtctcgtctactgttc

SEQ ID NO: 44903 - DNA, 16 bp, synthetic construct
  misc_feature 1..16: note = synthetic [barcode part1]
  source 1..16: mol_type = other DNA
tgcactcgttcttgtc

SEQ ID NO: 44904 - DNA, 16 bp, synthetic construct
  misc_feature 1..16: note = synthetic [barcode part1]
  source 1..16: mol_type = other DNA
tgaataggcagtgttg

SEQ ID NO: 44905 - DNA, 16 bp, synthetic construct
  misc_feature 1..16: note = synthetic [barcode part1]
  source 1..16: mol_type = other DNA
gcgtatactgattggc

SEQ ID NO: 44906 - DNA, 16 bp, synthetic construct
  misc_feature 1..16: note = synthetic [barcode part1]
  source 1..16: mol_type = other DNA
ccgatatctccttaag

SEQ ID NO: 44907 - DNA, 16 bp, synthetic construct
  misc_feature 1..16: note = synthetic [barcode part1]
  source 1..16: mol_type = other DNA
aacaccagttgcaacc

SEQ ID NO: 44908 - DNA, 16 bp, synthetic construct
  misc_feature 1..16: note = synthetic [barcode part1]
  source 1..16: mol_type = other DNA
tacgtcacaaccacag

SEQ ID NO: 44909 - DNA, 16 bp, synthetic construct
  misc_feature 1..16: note = synthetic [barcode part1]
  source 1..16: mol_type = other DNA
ttctcgagtgtgttgt

SEQ ID NO: 44910 - DNA, 16 bp, synthetic construct
  misc_feature 1..16: note = synthetic [barcode part1]
  source 1..16: mol_type = other DNA
acgttaacggcggagt

SEQ ID NO: 44911 - DNA, 16 bp, synthetic construct
  misc_feature 1..16: note = synthetic [barcode part1]
  source 1..16: mol_type = other DNA
ccggatcggttattag

SEQ ID NO: 44912 - DNA, 16 bp, synthetic construct
  misc_feature 1..16: note = synthetic [barcode part1]
  source 1..16: mol_type = other DNA
taatccgcctgtgtcg

SEQ ID NO: 44913 - DNA, 16 bp, synthetic construct
  misc_feature 1..16: note = synthetic [barcode part1]
  source 1..16: mol_type = other DNA
gtcaatccttccttcg

SEQ ID NO: 44914 - DNA, 16 bp, synthetic construct
  misc_feature 1..16: note = synthetic [barcode part1]
  source 1..16: mol_type = other DNA
cgtctctccagatcag

SEQ ID NO: 44915 - DNA, 16 bp, synthetic construct
  misc_feature 1..16: note = synthetic [barcode part1]
  source 1..16: mol_type = other DNA
ttcggccgttgtgtgt

SEQ ID NO: 44916 - DNA, 16 bp, synthetic construct
  misc_feature 1..16: note = synthetic [barcode part1]
  source 1..16: mol_type = other DNA
cacacggcactaatac

SEQ ID NO: 44917 - DNA, 16 bp, synthetic construct
  misc_feature 1..16: note = synthetic [barcode part1]
  source 1..16: mol_type = other DNA
tactggagtgagaatc

SEQ ID NO: 44918 - DNA, 16 bp, synthetic construct
  misc_feature 1..16: note = synthetic [barcode part1]
  source 1..16: mol_type = other DNA
tgacgccttatccgtg

SEQ ID NO: 44919 - DNA, 16 bp, synthetic construct
  misc_feature 1..16: note = synthetic [barcode part1]
  source 1..16: mol_type = other DNA
tctcggcctagtacgt

SEQ ID NO: 44920 - DNA, 16 bp, synthetic construct
  misc_feature 1..16: note = synthetic [barcode part1]
  source 1..16: mol_type = other DNA
ttaaggacgcaagttg

SEQ ID NO: 44921 - DNA, 16 bp, synthetic construct
  misc_feature 1..16: note = synthetic [barcode part1]
  source 1..16: mol_type = other DNA
gcctcgtctcaatctt

SEQ ID NO: 44922 - DNA, 16 bp, synthetic construct
  misc_feature 1..16: note = synthetic [barcode part1]
  source 1..16: mol_type = other DNA
atcgagtcctgcgttc

SEQ ID NO: 44923 - DNA, 16 bp, synthetic construct
  misc_feature 1..16: note = synthetic [barcode part1]
  source 1..16: mol_type = other DNA
taccgcgagaattctg

SEQ ID NO: 44924 - DNA, 16 bp, synthetic construct
  misc_feature 1..16: note = synthetic [barcode part1]
  source 1..16: mol_type = other DNA
gaattagtagtgcacg

SEQ ID NO: 44925 - DNA, 16 bp, synthetic construct
  misc_feature 1..16: note = synthetic [barcode part1]
  source 1..16: mol_type = other DNA
ccagaccaatctaacg

SEQ ID NO: 44926 - DNA, 16 bp, synthetic construct
  misc_feature 1..16: note = synthetic [barcode part1]
  source 1..16: mol_type = other DNA
gatcgttggcacagag

SEQ ID NO: 44927 - DNA, 16 bp, synthetic construct
  misc_feature 1..16: note = synthetic [barcode part1]
  source 1..16: mol_type = other DNA
accgaacaacgcgagt

SEQ ID NO: 44928 - DNA, 16 bp, synthetic construct
  misc_feature 1..16: note = synthetic [barcode part1]
  source 1..16: mol_type = other DNA
cagattctgttgttcg

SEQ ID NO: 44929 - DNA, 16 bp, synthetic construct
  misc_feature 1..16: note = synthetic [barcode part1]
  source 1..16: mol_type = other DNA
cctcttggatatactg

SEQ ID NO: 44930 - DNA, 16 bp, synthetic construct
  misc_feature 1..16: note = synthetic [barcode part1]
  source 1..16: mol_type = other DNA
aagtgcctggaatagt

SEQ ID NO: 44931 - DNA, 16 bp, synthetic construct
  misc_feature 1..16: note = synthetic [barcode part1]
  source 1..16: mol_type = other DNA
caagtgttaatcctcc

SEQ ID NO: 44932 - DNA, 16 bp, synthetic construct
  misc_feature 1..16: note = synthetic [barcode part1]
  source 1..16: mol_type = other DNA
acgtggttgtgcgatt

SEQ ID NO: 44933 - DNA, 16 bp, synthetic construct
  misc_feature 1..16: note = synthetic [barcode part1]
  source 1..16: mol_type = other DNA
acttgtcgtggtatct

SEQ ID NO: 44934 - DNA, 16 bp, synthetic construct
  misc_feature 1..16: note = synthetic [barcode part1]
  source 1..16: mol_type = other DNA
tgttactggcggtaac

SEQ ID NO: 44935 - DNA, 16 bp, synthetic construct
  misc_feature 1..16: note = synthetic [barcode part1]
  source 1..16: mol_type = other DNA
gagttacagtgacctc

SEQ ID NO: 44936 - DNA, 16 bp, synthetic construct
  misc_feature 1..16: note = synthetic [barcode part1]
  source 1..16: mol_type = other DNA
tcgcgagtagattcac

SEQ ID NO: 44937 - DNA, 16 bp, synthetic construct
  misc_feature 1..16: note = synthetic [barcode part1]
  source 1..16: mol_type = other DNA
gccaacagaatcaagt

SEQ ID NO: 44938 - DNA, 16 bp, synthetic construct
  misc_feature 1..16: note = synthetic [barcode part1]
  source 1..16: mol_type = other DNA
atctcgagatcggttg

SEQ ID NO: 44939 - DNA, 16 bp, synthetic construct
  misc_feature 1..16: note = synthetic [barcode part1]
  source 1..16: mol_type = other DNA
gatcgattgacgtcac

SEQ ID NO: 44940 - DNA, 16 bp, synthetic construct
  misc_feature 1..16: note = synthetic [barcode part1]
  source 1..16: mol_type = other DNA
ccttcgaggagttaac

SEQ ID NO: 44941 - DNA, 16 bp, synthetic construct
  misc_feature 1..16: note = synthetic [barcode part1]
  source 1..16: mol_type = other DNA
agactattcgcgttct

SEQ ID NO: 44942 - DNA, 16 bp, synthetic construct
  misc_feature 1..16: note = synthetic [barcode part1]
  source 1..16: mol_type = other DNA
tccgaccaccgatact

SEQ ID NO: 44943 - DNA, 16 bp, synthetic construct
  misc_feature 1..16: note = synthetic [barcode part1]
  source 1..16: mol_type = other DNA
accacggaacaagtgc

SEQ ID NO: 44944 - DNA, 16 bp, synthetic construct
  misc_feature 1..16: note = synthetic [barcode part1]
  source 1..16: mol_type = other DNA
ttgttactctaccgcc

SEQ ID NO: 44945 - DNA, 16 bp, synthetic construct
  misc_feature 1..16: note = synthetic [barcode part1]
  source 1..16: mol_type = other DNA
ccgaataggtaaggcc

SEQ ID NO: 44946 - DNA, 16 bp, synthetic construct
  misc_feature 1..16: note = synthetic [barcode part1]
  source 1..16: mol_type = other DNA
aacacacaccaacgtc

SEQ ID NO: 44947 - DNA, 16 bp, synthetic construct
  misc_feature 1..16: note = synthetic [barcode part1]
  source 1..16: mol_type = other DNA
tcgcaataggaggaag

SEQ ID NO: 44948 - DNA, 16 bp, synthetic construct
  misc_feature 1..16: note = synthetic [barcode part1]
  source 1..16: mol_type = other DNA
tcctcactgaaccgtg

SEQ ID NO: 44949 - DNA, 16 bp, synthetic construct
  misc_feature 1..16: note = synthetic [barcode part1]
  source 1..16: mol_type = other DNA
ttcgaggcgatcaact

SEQ ID NO: 44950 - DNA, 16 bp, synthetic construct
  misc_feature 1..16: note = synthetic [barcode part1]
  source 1..16: mol_type = other DNA
tgaggtcttcctctct

SEQ ID NO: 44951 - DNA, 16 bp, synthetic construct
  misc_feature 1..16: note = synthetic [barcode part1]
  source 1..16: mol_type = other DNA
tgcaacgccactcgtt

SEQ ID NO: 44952 - DNA, 16 bp, synthetic construct
  misc_feature 1..16: note = synthetic [barcode part1]
  source 1..16: mol_type = other DNA
ttatccacctacctgc

SEQ ID NO: 44953 - DNA, 16 bp, synthetic construct
  misc_feature 1..16: note = synthetic [barcode part1]
  source 1..16: mol_type = other DNA
tccgagatcggaatct

SEQ ID NO: 44954 - DNA, 16 bp, synthetic construct
  misc_feature 1..16: note = synthetic [barcode part1]
  source 1..16: mol_type = other DNA
ttggacgcgttgtcct

SEQ ID NO: 44955 - DNA, 16 bp, synthetic construct
  misc_feature 1..16: note = synthetic [barcode part1]
  source 1..16: mol_type = other DNA
gactctcgattatacc

SEQ ID NO: 44956 - DNA, 16 bp, synthetic construct
  misc_feature 1..16: note = synthetic [barcode part1]
  source 1..16: mol_type = other DNA
cgattctatcgcgcgt

SEQ ID NO: 44957 - DNA, 16 bp, synthetic construct
  misc_feature 1..16: note = synthetic [barcode part1]
  source 1..16: mol_type = other DNA
attcggtaatccgacg

SEQ ID NO: 44958 - DNA, 16 bp, synthetic construct
  misc_feature 1..16: note = synthetic [barcode part1]
  source 1..16: mol_type = other DNA
cgtcttcgccagattg

SEQ ID NO: 44959 - DNA, 16 bp, synthetic construct
  misc_feature 1..16: note = synthetic [barcode part1]
  source 1..16: mol_type = other DNA
attcaagtccgtcgtt

SEQ ID NO: 44960 - DNA, 16 bp, synthetic construct
  misc_feature 1..16: note = synthetic [barcode part1]
  source 1..16: mol_type = other DNA
gtgatcggatcttctt

SEQ ID NO: 44961 - DNA, 16 bp, synthetic construct
  misc_feature 1..16: note = synthetic [barcode part1]
  source 1..16: mol_type = other DNA
gcgagagtctcgtatt

SEQ ID NO: 44962 - DNA, 16 bp, synthetic construct
  misc_feature 1..16: note = synthetic [barcode part1]
  source 1..16: mol_type = other DNA
agaaccgcaattctcg

SEQ ID NO: 44963 - DNA, 16 bp, synthetic construct
  misc_feature 1..16: note = synthetic [barcode part1]
  source 1..16: mol_type = other DNA
cgtagtgtacttacct

SEQ ID NO: 44964 - DNA, 16 bp, synthetic construct
  misc_feature 1..16: note = synthetic [barcode part1]
  source 1..16: mol_type = other DNA
gtgccaacctccgatt

SEQ ID NO: 44965 - DNA, 16 bp, synthetic construct
  misc_feature 1..16: note = synthetic [barcode part1]
  source 1..16: mol_type = other DNA
gcctctaagaccgttc

SEQ ID NO: 44966 - DNA, 16 bp, synthetic construct
  misc_feature 1..16: note = synthetic [barcode part1]
  source 1..16: mol_type = other DNA
tatctcttctcgcacg

SEQ ID NO: 44967 - DNA, 16 bp, synthetic construct
  misc_feature 1..16: note = synthetic [barcode part1]
  source 1..16: mol_type = other DNA
cacacgagagtgtctt

SEQ ID NO: 44968 - DNA, 16 bp, synthetic construct
  misc_feature 1..16: note = synthetic [barcode part1]
  source 1..16: mol_type = other DNA
attacctaggcggtac

SEQ ID NO: 44969 - DNA, 16 bp, synthetic construct
  misc_feature 1..16: note = synthetic [barcode part1]
  source 1..16: mol_type = other DNA
agtcaatacgcgcgtt

SEQ ID NO: 44970 - DNA, 16 bp, synthetic construct
  misc_feature 1..16: note = synthetic [barcode part1]
  source 1..16: mol_type = other DNA
gtcactcagatccacc

SEQ ID NO: 44971 - DNA, 16 bp, synthetic construct
  misc_feature 1..16: note = synthetic [barcode part1]
  source 1..16: mol_type = other DNA
gtgtcgagatcacact

SEQ ID NO: 44972 - DNA, 16 bp, synthetic construct
  misc_feature 1..16: note = synthetic [barcode part1]
  source 1..16: mol_type = other DNA
cagttacctatcgccg

SEQ ID NO: 44973 - DNA, 16 bp, synthetic construct
  misc_feature 1..16: note = synthetic [barcode part1]
  source 1..16: mol_type = other DNA
gtatattctcagtccg

SEQ ID NO: 44974 - DNA, 16 bp, synthetic construct
  misc_feature 1..16: note = synthetic [barcode part1]
  source 1..16: mol_type = other DNA
gtatcgtcttgtctag

SEQ ID NO: 44975 - DNA, 16 bp, synthetic construct
  misc_feature 1..16: note = synthetic [barcode part1]
  source 1..16: mol_type = other DNA
gacctgcacgatagag

SEQ ID NO: 44976 - DNA, 16 bp, synthetic construct
  misc_feature 1..16: note = synthetic [barcode part1]
  source 1..16: mol_type = other DNA
aattgcggagatcaac

SEQ ID NO: 44977 - DNA, 16 bp, synthetic construct
  misc_feature 1..16: note = synthetic [barcode part1]
  source 1..16: mol_type = other DNA
aagactcgataggcgc

SEQ ID NO: 44978 - DNA, 16 bp, synthetic construct
  misc_feature 1..16: note = synthetic [barcode part1]
  source 1..16: mol_type = other DNA
aggacacctagtgacg

SEQ ID NO: 44979 - DNA, 16 bp, synthetic construct
  misc_feature 1..16: note = synthetic [barcode part1]
  source 1..16: mol_type = other DNA
attcgcagttagagag

SEQ ID NO: 44980 - DNA, 16 bp, synthetic construct
  misc_feature 1..16: note = synthetic [barcode part1]
  source 1..16: mol_type = other DNA
tatcctgattcacggt

SEQ ID NO: 44981 - DNA, 16 bp, synthetic construct
  misc_feature 1..16: note = synthetic [barcode part1]
  source 1..16: mol_type = other DNA
cagttgtaggttgaag

SEQ ID NO: 44982 - DNA, 16 bp, synthetic construct
  misc_feature 1..16: note = synthetic [barcode part1]
  source 1..16: mol_type = other DNA
tccggaattgatcggt

SEQ ID NO: 44983 - DNA, 16 bp, synthetic construct
  misc_feature 1..16: note = synthetic [barcode part1]
  source 1..16: mol_type = other DNA
aacgcaccttcttagt

SEQ ID NO: 44984 - DNA, 16 bp, synthetic construct
  misc_feature 1..16: note = synthetic [barcode part1]
  source 1..16: mol_type = other DNA
acgacgaagtgcgttg

SEQ ID NO: 44985 - DNA, 16 bp, synthetic construct
  misc_feature 1..16: note = synthetic [barcode part1]
  source 1..16: mol_type = other DNA
gtaccaggcacttagt

SEQ ID NO: 44986 - DNA, 16 bp, synthetic construct
  misc_feature 1..16: note = synthetic [barcode part1]
  source 1..16: mol_type = other DNA
tatccacgcaacactt

SEQ ID NO: 44987 - DNA, 16 bp, synthetic construct
  misc_feature 1..16: note = synthetic [barcode part1]
  source 1..16: mol_type = other DNA
aacctactgtcacttg

SEQ ID NO: 44988 - DNA, 16 bp, synthetic construct
  misc_feature 1..16: note = synthetic [barcode part1]
  source 1..16: mol_type = other DNA
tcagataccgcagact

SEQ ID NO: 44989 - DNA, 16 bp, synthetic construct
  misc_feature 1..16: note = synthetic [barcode part1]
  source 1..16: mol_type = other DNA
gaggacacgaactgtc

SEQ ID NO: 44990 - DNA, 16 bp, synthetic construct
  misc_feature 1..16: note = synthetic [barcode part1]
  source 1..16: mol_type = other DNA
cactgttccgtgtggt

SEQ ID NO: 44991 - DNA, 16 bp, synthetic construct
  misc_feature 1..16: note = synthetic [barcode part1]
  source 1..16: mol_type = other DNA
cgcactcaagttatct

SEQ ID NO: 44992 - DNA, 16 bp, synthetic construct
  misc_feature 1..16: note = synthetic [barcode part1]
  source 1..16: mol_type = other DNA
caattctatcggtacc

SEQ ID NO: 44993 - DNA, 16 bp, synthetic construct
  misc_feature 1..16: note = synthetic [barcode part1]
  source 1..16: mol_type = other DNA
accactacgcaccttg

SEQ ID NO: 44994 - DNA, 16 bp, synthetic construct
  misc_feature 1..16: note = synthetic [barcode part1]
  source 1..16: mol_type = other DNA
tcacttagaacttcgc

SEQ ID NO: 44995 - DNA, 16 bp, synthetic construct
  misc_feature 1..16: note = synthetic [barcode part1]
  source 1..16: mol_type = other DNA
cggcggtaacttgatt

SEQ ID NO: 44996 - DNA, 16 bp, synthetic construct
  misc_feature 1..16: note = synthetic [barcode part1]
  source 1..16: mol_type = other DNA
tgtctgtgttcgtcct

SEQ ID NO: 44997 - DNA, 16 bp, synthetic construct
  misc_feature 1..16: note = synthetic [barcode part1]
  source 1..16: mol_type = other DNA
agtctacgtcttgccg

SEQ ID NO: 44998 - DNA, 16 bp, synthetic construct
  misc_feature 1..16: note = synthetic [barcode part1]
  source 1..16: mol_type = other DNA
tctcggtgtataactc

SEQ ID NO: 44999 - DNA, 16 bp, synthetic construct
  misc_feature 1..16: note = synthetic [barcode part1]
  source 1..16: mol_type = other DNA
aacgagatacaggtct

SEQ ID NO: 45000 - DNA, 16 bp, synthetic construct
  misc_feature 1..16: note = synthetic [barcode part1]
  source 1..16: mol_type = other DNA
tagttggactggtcac

SEQ ID NO: 45001 - DNA, 16 bp, synthetic construct
  misc_feature 1..16: note = synthetic [barcode part1]
  source 1..16: mol_type = other DNA
gattcacggacggtag

SEQ ID NO: 45002 - DNA, 16 bp, synthetic construct
  misc_feature 1..16: note = synthetic [barcode part1]
  source 1..16: mol_type = other DNA
gtgtcggactacttcc

SEQ ID NO: 45003 - DNA, 16 bp, synthetic construct
  misc_feature 1..16: note = synthetic [barcode part1]
  source 1..16: mol_type = other DNA
tacgcctcttaacaac

SEQ ID NO: 45004 - DNA, 16 bp, synthetic construct
  misc_feature 1..16: note = synthetic [barcode part1]
  source 1..16: mol_type = other DNA
acggtattcggagttc

SEQ ID NO: 45005 - DNA, 16 bp, synthetic construct
  misc_feature 1..16: note = synthetic [barcode part1]
  source 1..16: mol_type = other DNA
atagttaaggatcggc

SEQ ID NO: 45006 - DNA, 16 bp, synthetic construct
  misc_feature 1..16: note = synthetic [barcode part1]
  source 1..16: mol_type = other DNA
gcgaagtggcacttag

SEQ ID NO: 45007 - DNA, 16 bp, synthetic construct
  misc_feature 1..16: note = synthetic [barcode part1]
  source 1..16: mol_type = other DNA
cgcgaattctgccgtt

SEQ ID NO: 45008 - DNA, 16 bp, synthetic construct
  misc_feature 1..16: note = synthetic [barcode part1]
  source 1..16: mol_type = other DNA
tggagagtgatacgcc

SEQ ID NO: 45009 - DNA, 16 bp, synthetic construct
  misc_feature 1..16: note = synthetic [barcode part1]
  source 1..16: mol_type = other DNA
tggaagagtacactgt

SEQ ID NO: 45010 - DNA, 16 bp, synthetic construct
  misc_feature 1..16: note = synthetic [barcode part1]
  source 1..16: mol_type = other DNA
ccttctgtccaacttg

SEQ ID NO: 45011 - DNA, 16 bp, synthetic construct
  misc_feature 1..16: note = synthetic [barcode part1]
  source 1..16: mol_type = other DNA
gagttcacctgtgaac

SEQ ID NO: 45012 - DNA, 16 bp, synthetic construct
  misc_feature 1..16: note = synthetic [barcode part1]
  source 1..16: mol_type = other DNA
gtgtggtgtgtgttgt

SEQ ID NO: 45013 - DNA, 16 bp, synthetic construct
  misc_feature 1..16: note = synthetic [barcode part1]
  source 1..16: mol_type = other DNA
cagttcaacttccgcg

SEQ ID NO: 45014 - DNA, 16 bp, synthetic construct
  misc_feature 1..16: note = synthetic [barcode part1]
  source 1..16: mol_type = other DNA
gtctcggattgactag

SEQ ID NO: 45015 - DNA, 16 bp, synthetic construct
  misc_feature 1..16: note = synthetic [barcode part1]
  source 1..16: mol_type = other DNA
ttggcgaggactactt

SEQ ID NO: 45016 - DNA, 16 bp, synthetic construct
  misc_feature 1..16: note = synthetic [barcode part1]
  source 1..16: mol_type = other DNA
cgcagaagtcaccaag

SEQ ID NO: 45017 - DNA, 16 bp, synthetic construct
  misc_feature 1..16: note = synthetic [barcode part1]
  source 1..16: mol_type = other DNA
tacggttgactcacag

SEQ ID NO: 45018 - DNA, 16 bp, synthetic construct
  misc_feature 1..16: note = synthetic [barcode part1]
  source 1..16: mol_type = other DNA
tgtctccttaacagtg

SEQ ID NO: 45019 - DNA, 16 bp, synthetic construct
  misc_feature 1..16: note = synthetic [barcode part1]
  source 1..16: mol_type = other DNA
cgattagagttccgac

SEQ ID NO: 45020 - DNA, 16 bp, synthetic construct
  misc_feature 1..16: note = synthetic [barcode part1]
  source 1..16: mol_type = other DNA
aagacgatcgcggact

SEQ ID NO: 45021 - DNA, 16 bp, synthetic construct
  misc_feature 1..16: note = synthetic [barcode part1]
  source 1..16: mol_type = other DNA
tgcgtgatccgactct

SEQ ID NO: 45022 - DNA, 16 bp, synthetic construct
  misc_feature 1..16: note = synthetic [barcode part1]
  source 1..16: mol_type = other DNA
tcggacgtctgttgtc

SEQ ID NO: 45023 - DNA, 16 bp, synthetic construct
  misc_feature 1..16: note = synthetic [barcode part1]
  source 1..16: mol_type = other DNA
tcagactccggattag

SEQ ID NO: 45024 - DNA, 16 bp, synthetic construct
  misc_feature 1..16: note = synthetic [barcode part1]
  source 1..16: mol_type = other DNA
gtgttagtcggatacc

SEQ ID NO: 45025 - DNA, 16 bp, synthetic construct
  misc_feature 1..16: note = synthetic [barcode part1]
  source 1..16: mol_type = other DNA
cgcaggcaagtagtgt

SEQ ID NO: 45026 - DNA, 16 bp, synthetic construct
  misc_feature 1..16: note = synthetic [barcode part1]
  source 1..16: mol_type = other DNA
gtgccaaggagactgt

SEQ ID NO: 45027 - DNA, 16 bp, synthetic construct
  misc_feature 1..16: note = synthetic [barcode part1]
  source 1..16: mol_type = other DNA
ttgttgtagactcacc

SEQ ID NO: 45028 - DNA, 16 bp, synthetic construct
  misc_feature 1..16: note = synthetic [barcode part1]
  source 1..16: mol_type = other DNA
agagtctcggaattcc

SEQ ID NO: 45029 - DNA, 16 bp, synthetic construct
  misc_feature 1..16: note = synthetic [barcode part1]
  source 1..16: mol_type = other DNA
gcgtcgtacaatactg

SEQ ID NO: 45030 - DNA, 16 bp, synthetic construct
  misc_feature 1..16: note = synthetic [barcode part1]
  source 1..16: mol_type = other DNA
actagtgcaccaacac

SEQ ID NO: 45031 - DNA, 16 bp, synthetic construct
  misc_feature 1..16: note = synthetic [barcode part1]
  source 1..16: mol_type = other DNA
tcaaggccgttcacct

SEQ ID NO: 45032 - DNA, 16 bp, synthetic construct
  misc_feature 1..16: note = synthetic [barcode part1]
  source 1..16: mol_type = other DNA
cacttcgtcgttctac

SEQ ID NO: 45033 - DNA, 16 bp, synthetic construct
  misc_feature 1..16: note = synthetic [barcode part1]
  source 1..16: mol_type = other DNA
ataatctcctgtgtcg

SEQ ID NO: 45034 - DNA, 16 bp, synthetic construct
  misc_feature 1..16: note = synthetic [barcode part1]
  source 1..16: mol_type = other DNA
gagaattatcggtacg

SEQ ID NO: 45035 - DNA, 16 bp, synthetic construct
  misc_feature 1..16: note = synthetic [barcode part1]
  source 1..16: mol_type = other DNA
attagaggaccttccg

SEQ ID NO: 45036 - DNA, 16 bp, synthetic construct
  misc_feature 1..16: note = synthetic [barcode part1]
  source 1..16: mol_type = other DNA
gtatcgtatagacgag

SEQ ID NO: 45037 - DNA, 16 bp, synthetic construct
  misc_feature 1..16: note = synthetic [barcode part1]
  source 1..16: mol_type = other DNA
attcgtcgagtggact

SEQ ID NO: 45038 - DNA, 16 bp, synthetic construct
  misc_feature 1..16: note = synthetic [barcode part1]
  source 1..16: mol_type = other DNA
caccgccacaattgtc

SEQ ID NO: 45039 - DNA, 16 bp, synthetic construct
  misc_feature 1..16: note = synthetic [barcode part1]
  source 1..16: mol_type = other DNA
tccgcgttaacggtct

SEQ ID NO: 45040 - DNA, 16 bp, synthetic construct
  misc_feature 1..16: note = synthetic [barcode part1]
  source 1..16: mol_type = other DNA
agtgaccaatccgact

SEQ ID NO: 45041 - DNA, 16 bp, synthetic construct
  misc_feature 1..16: note = synthetic [barcode part1]
  source 1..16: mol_type = other DNA
gccggttagaattctg

SEQ ID NO: 45042 - DNA, 16 bp, synthetic construct
  misc_feature 1..16: note = synthetic [barcode part1]
  source 1..16: mol_type = other DNA
accaccgtgataactg

SEQ ID NO: 45043 - DNA, 16 bp, synthetic construct
  misc_feature 1..16: note = synthetic [barcode part1]
  source 1..16: mol_type = other DNA
tgtacacaaccagtcg

SEQ ID NO: 45044 - DNA, 16 bp, synthetic construct
  misc_feature 1..16: note = synthetic [barcode part1]
  source 1..16: mol_type = other DNA
attaggaccagttccg

SEQ ID NO: 45045 - DNA, 16 bp, synthetic construct
  misc_feature 1..16: note = synthetic [barcode part1]
  source 1..16: mol_type = other DNA
atcacctcggagtagt

SEQ ID NO: 45046 - DNA, 16 bp, synthetic construct
  misc_feature 1..16: note = synthetic [barcode part1]
  source 1..16: mol_type = other DNA
acaaccacctcggttc

SEQ ID NO: 45047 - DNA, 16 bp, synthetic construct
  misc_feature 1..16: note = synthetic [barcode part1]
  source 1..16: mol_type = other DNA
gtaccgaagagtaact

SEQ ID NO: 45048 - DNA, 16 bp, synthetic construct
  misc_feature 1..16: note = synthetic [barcode part1]
  source 1..16: mol_type = other DNA
actgtgtcagttcttg

SEQ ID NO: 45049 - DNA, 16 bp, synthetic construct
  misc_feature 1..16: note = synthetic [barcode part1]
  source 1..16: mol_type = other DNA
gataggcagatcttag

SEQ ID NO: 45050 - DNA, 16 bp, synthetic construct
  misc_feature 1..16: note = synthetic [barcode part1]
  source 1..16: mol_type = other DNA
ttacacttcgtcgaac

SEQ ID NO: 45051 - DNA, 16 bp, synthetic construct
  misc_feature 1..16: note = synthetic [barcode part1]
  source 1..16: mol_type = other DNA
cagagtctgcaacgtt

SEQ ID NO: 45052 - DNA, 16 bp, synthetic construct
  misc_feature 1..16: note = synthetic [barcode part1]
  source 1..16: mol_type = other DNA
ttgttatcaggcgtct

SEQ ID NO: 45053 - DNA, 16 bp, synthetic construct
  misc_feature 1..16: note = synthetic [barcode part1]
  source 1..16: mol_type = other DNA
aggatctaataggtgc

SEQ ID NO: 45054 - DNA, 16 bp, synthetic construct
  misc_feature 1..16: note = synthetic [barcode part1]
  source 1..16: mol_type = other DNA
cgagatcactgcagtt

SEQ ID NO: 45055 - DNA, 16 bp, synthetic construct
  misc_feature 1..16: note = synthetic [barcode part1]
  source 1..16: mol_type = other DNA
cctccagtgattgcgt

SEQ ID NO: 45056 - DNA, 16 bp, synthetic construct
  misc_feature 1..16: note = synthetic [barcode part1]
  source 1..16: mol_type = other DNA
tggagaggaagaatcc

SEQ ID NO: 45057 - DNA, 16 bp, synthetic construct
  misc_feature 1..16: note = synthetic [barcode part1]
  source 1..16: mol_type = other DNA
tataccgtaacgcacg

SEQ ID NO: 45058 - DNA, 16 bp, synthetic construct
  misc_feature 1..16: note = synthetic [barcode part1]
  source 1..16: mol_type = other DNA
agatcgtgcagtctac

SEQ ID NO: 45059 - DNA, 16 bp, synthetic construct
  misc_feature 1..16: note = synthetic [barcode part1]
  source 1..16: mol_type = other DNA
tgagtctgcgacgaag

SEQ ID NO: 45060 - DNA, 16 bp, synthetic construct
  misc_feature 1..16: note = synthetic [barcode part1]
  source 1..16: mol_type = other DNA
acactggaaggtgatt

SEQ ID NO: 45061 - DNA, 16 bp, synthetic construct
  misc_feature 1..16: note = synthetic [barcode part1]
  source 1..16: mol_type = other DNA
gtcaacacgagaggtc

SEQ ID NO: 45062 - DNA, 16 bp, synthetic construct
  misc_feature 1..16: note = synthetic [barcode part1]
  source 1..16: mol_type = other DNA
ttgcctgtccgagatc

SEQ ID NO: 45063 - DNA, 16 bp, synthetic construct
  misc_feature 1..16: note = synthetic [barcode part1]
  source 1..16: mol_type = other DNA
gtgagaatcgacaact

SEQ ID NO: 45064 - DNA, 16 bp, synthetic construct
  misc_feature 1..16: note = synthetic [barcode part1]
  source 1..16: mol_type = other DNA
caatataacgtccggc

SEQ ID NO: 45065 - DNA, 16 bp, synthetic construct
  misc_feature 1..16: note = synthetic [barcode part1]
  source 1..16: mol_type = other DNA
aggtatagacttgacg

SEQ ID NO: 45066 - DNA, 16 bp, synthetic construct
  misc_feature 1..16: note = synthetic [barcode part1]
  source 1..16: mol_type = other DNA
ttggtccacaggatac

SEQ ID NO: 45067 - DNA, 16 bp, synthetic construct
  misc_feature 1..16: note = synthetic [barcode part1]
  source 1..16: mol_type = other DNA
gttgaactactggacc

SEQ ID NO: 45068 - DNA, 16 bp, synthetic construct
  misc_feature 1..16: note = synthetic [barcode part1]
  source 1..16: mol_type = other DNA
cgaagtccacagtact

SEQ ID NO: 45069 - DNA, 16 bp, synthetic construct
  misc_feature 1..16: note = synthetic [barcode part1]
  source 1..16: mol_type = other DNA
gtcgaagtagtgcgtg

SEQ ID NO: 45070 - DNA, 16 bp, synthetic construct
  misc_feature 1..16: note = synthetic [barcode part1]
  source 1..16: mol_type = other DNA
aagtcgtgtggaggtc

SEQ ID NO: 45071 - DNA, 16 bp, synthetic construct
  misc_feature 1..16: note = synthetic [barcode part1]
  source 1..16: mol_type = other DNA
gtcttgcgtggttacc

SEQ ID NO: 45072 - DNA, 16 bp, synthetic construct
  misc_feature 1..16: note = synthetic [barcode part1]
  source 1..16: mol_type = other DNA
caggtgacttaggacg

SEQ ID NO: 45073 - DNA, 16 bp, synthetic construct
  misc_feature 1..16: note = synthetic [barcode part1]
  source 1..16: mol_type = other DNA
aagagtagacgtaggc

SEQ ID NO: 45074 - DNA, 16 bp, synthetic construct
  misc_feature 1..16: note = synthetic [barcode part1]
  source 1..16: mol_type = other DNA
gacgcacttccaactc

SEQ ID NO: 45075 - DNA, 16 bp, synthetic construct
  misc_feature 1..16: note = synthetic [barcode part1]
  source 1..16: mol_type = other DNA
tgacactataggcaag

SEQ ID NO: 45076 - DNA, 16 bp, synthetic construct
  misc_feature 1..16: note = synthetic [barcode part1]
  source 1..16: mol_type = other DNA
tgaaggaattgcacgt

SEQ ID NO: 45077 - DNA, 16 bp, synthetic construct
  misc_feature 1..16: note = synthetic [barcode part1]
  source 1..16: mol_type = other DNA
aatagagaatctgcgc

SEQ ID NO: 45078 - DNA, 16 bp, synthetic construct
  misc_feature 1..16: note = synthetic [barcode part1]
  source 1..16: mol_type = other DNA
gttcgtccttacctac

SEQ ID NO: 45079 - DNA, 16 bp, synthetic construct
  misc_feature 1..16: note = synthetic [barcode part1]
  source 1..16: mol_type = other DNA
caatccacgccttcag

SEQ ID NO: 45080 - DNA, 16 bp, synthetic construct
  misc_feature 1..16: note = synthetic [barcode part1]
  source 1..16: mol_type = other DNA
ttaccttccgatacag

SEQ ID NO: 45081 - DNA, 16 bp, synthetic construct
  misc_feature 1..16: note = synthetic [barcode part1]
  source 1..16: mol_type = other DNA
ttctgtgcagtaacct

SEQ ID NO: 45082 - DNA, 16 bp, synthetic construct
  misc_feature 1..16: note = synthetic [barcode part1]
  source 1..16: mol_type = other DNA
gtccactcctagaacc

SEQ ID NO: 45083 - DNA, 16 bp, synthetic construct
  misc_feature 1..16: note = synthetic [barcode part1]
  source 1..16: mol_type = other DNA
aacctactctgccgtg

SEQ ID NO: 45084 - DNA, 16 bp, synthetic construct
  misc_feature 1..16: note = synthetic [barcode part1]
  source 1..16: mol_type = other DNA
cggtaccaagtgaacg

SEQ ID NO: 45085 - DNA, 16 bp, synthetic construct
  misc_feature 1..16: note = synthetic [barcode part1]
  source 1..16: mol_type = other DNA
aaggtaacaggacgac

SEQ ID NO: 45086 - DNA, 16 bp, synthetic construct
  misc_feature 1..16: note = synthetic [barcode part1]
  source 1..16: mol_type = other DNA
aagaatcctggccttg

SEQ ID NO: 45087 - DNA, 16 bp, synthetic construct
  misc_feature 1..16: note = synthetic [barcode part1]
  source 1..16: mol_type = other DNA
gtccaatatacctctg

SEQ ID NO: 45088 - DNA, 16 bp, synthetic construct
  misc_feature 1..16: note = synthetic [barcode part1]
  source 1..16: mol_type = other DNA
gccgataggcaacagt

SEQ ID NO: 45089 - DNA, 16 bp, synthetic construct
  misc_feature 1..16: note = synthetic [barcode part1]
  source 1..16: mol_type = other DNA
tgttgcaacgtacgtg

SEQ ID NO: 45090 - DNA, 16 bp, synthetic construct
  misc_feature 1..16: note = synthetic [barcode part1]
  source 1..16: mol_type = other DNA
attccgtaacggcagt

SEQ ID NO: 45091 - DNA, 16 bp, synthetic construct
  misc_feature 1..16: note = synthetic [barcode part1]
  source 1..16: mol_type = other DNA
tctgccagtattcggc

SEQ ID NO: 45092 - DNA, 16 bp, synthetic construct
  misc_feature 1..16: note = synthetic [barcode part1]
  source 1..16: mol_type = other DNA
gtacggagaattatcg

SEQ ID NO: 45093 - DNA, 16 bp, synthetic construct
  misc_feature 1..16: note = synthetic [barcode part1]
  source 1..16: mol_type = other DNA
tacaacctacgtcgag

SEQ ID NO: 45094 - DNA, 16 bp, synthetic construct
  misc_feature 1..16: note = synthetic [barcode part1]
  source 1..16: mol_type = other DNA
tacagacgaactcgtc

SEQ ID NO: 45095 - DNA, 16 bp, synthetic construct
  misc_feature 1..16: note = synthetic [barcode part1]
  source 1..16: mol_type = other DNA
cagattgcgcactctc

SEQ ID NO: 45096 - DNA, 16 bp, synthetic construct
  misc_feature 1..16: note = synthetic [barcode part1]
  source 1..16: mol_type = other DNA
tgttcgtacctcaagt

SEQ ID NO: 45097 - DNA, 16 bp, synthetic construct
  misc_feature 1..16: note = synthetic [barcode part1]
  source 1..16: mol_type = other DNA
gccttaagaggaagag

SEQ ID NO: 45098 - DNA, 16 bp, synthetic construct
  misc_feature 1..16: note = synthetic [barcode part1]
  source 1..16: mol_type = other DNA
cggaactaaggtcctt

SEQ ID NO: 45099 - DNA, 16 bp, synthetic construct
  misc_feature 1..16: note = synthetic [barcode part1]
  source 1..16: mol_type = other DNA
ccaacaggtaggaatt

SEQ ID NO: 45100 - DNA, 16 bp, synthetic construct
  misc_feature 1..16: note = synthetic [barcode part1]
  source 1..16: mol_type = other DNA
cctgattccgatcctt

SEQ ID NO: 45101 - DNA, 16 bp, synthetic construct
  misc_feature 1..16: note = synthetic [barcode part1]
  source 1..16: mol_type = other DNA
tgccttctaacctaag

SEQ ID NO: 45102 - DNA, 16 bp, synthetic construct
  misc_feature 1..16: note = synthetic [barcode part1]
  source 1..16: mol_type = other DNA
gcaactgcgtaatcgt

SEQ ID NO: 45103 - DNA, 16 bp, synthetic construct
  misc_feature 1..16: note = synthetic [barcode part1]
  source 1..16: mol_type = other DNA
acagtatacgcgcgtt

SEQ ID NO: 45104 - DNA, 16 bp, synthetic construct
  misc_feature 1..16: note = synthetic [barcode part1]
  source 1..16: mol_type = other DNA
cagtgtaggaagtcgc

SEQ ID NO: 45105 - DNA, 16 bp, synthetic construct
  misc_feature 1..16: note = synthetic [barcode part1]
  source 1..16: mol_type = other DNA
gacgtcaacacgtact

SEQ ID NO: 45106 - DNA, 16 bp, synthetic construct
  misc_feature 1..16: note = synthetic [barcode part1]
  source 1..16: mol_type = other DNA
gaactggcgcagttag

SEQ ID NO: 45107 - DNA, 16 bp, synthetic construct
  misc_feature 1..16: note = synthetic [barcode part1]
  source 1..16: mol_type = other DNA
ttaatagtgtcctcgc

SEQ ID NO: 45108 - DNA, 16 bp, synthetic construct
  misc_feature 1..16: note = synthetic [barcode part1]
  source 1..16: mol_type = other DNA
cgttgagttacacctt

SEQ ID NO: 45109 - DNA, 16 bp, synthetic construct
  misc_feature 1..16: note = synthetic [barcode part1]
  source 1..16: mol_type = other DNA
ttggagtggcggatac

SEQ ID NO: 45110 - DNA, 16 bp, synthetic construct
  misc_feature 1..16: note = synthetic [barcode part1]
  source 1..16: mol_type = other DNA
tcacttattacgacgc

SEQ ID NO: 45111 - DNA, 16 bp, synthetic construct
  misc_feature 1..16: note = synthetic [barcode part1]
  source 1..16: mol_type = other DNA
gaatctggcagagtgc

SEQ ID NO: 45112 - DNA, 16 bp, synthetic construct
  misc_feature 1..16: note = synthetic [barcode part1]
  source 1..16: mol_type = other DNA
gtcttgccgagtctac

SEQ ID NO: 45113 - DNA, 16 bp, synthetic construct
  misc_feature 1..16: note = synthetic [barcode part1]
  source 1..16: mol_type = other DNA
ataccgttgttcgccg

SEQ ID NO: 45114 - DNA, 16 bp, synthetic construct
  misc_feature 1..16: note = synthetic [barcode part1]
  source 1..16: mol_type = other DNA
ccggaacttgtagtac

SEQ ID NO: 45115 - DNA, 16 bp, synthetic construct
  misc_feature 1..16: note = synthetic [barcode part1]
  source 1..16: mol_type = other DNA
cgtcgagatccaatac

SEQ ID NO: 45116 - DNA, 16 bp, synthetic construct
  misc_feature 1..16: note = synthetic [barcode part1]
  source 1..16: mol_type = other DNA
cgacacaggagtaatt

SEQ ID NO: 45117 - DNA, 16 bp, synthetic construct
  misc_feature 1..16: note = synthetic [barcode part1]
  source 1..16: mol_type = other DNA
ttctatccgtcgttcg

SEQ ID NO: 45118 - DNA, 16 bp, synthetic construct
  misc_feature 1..16: note = synthetic [barcode part1]
  source 1..16: mol_type = other DNA
acggaagtcggactac

SEQ ID NO: 45119 - DNA, 16 bp, synthetic construct
  misc_feature 1..16: note = synthetic [barcode part1]
  source 1..16: mol_type = other DNA
attctcggagttacct

SEQ ID NO: 45120 - DNA, 16 bp, synthetic construct
  misc_feature 1..16: note = synthetic [barcode part1]
  source 1..16: mol_type = other DNA
ccgaatattaccttgc

SEQ ID NO: 45121 - DNA, 16 bp, synthetic construct
  misc_feature 1..16: note = synthetic [barcode part1]
  source 1..16: mol_type = other DNA
aggtggttggtaagag

SEQ ID NO: 45122 - DNA, 16 bp, synthetic construct
  misc_feature 1..16: note = synthetic [barcode part1]
  source 1..16: mol_type = other DNA
tcacagtaccacaacg

SEQ ID NO: 45123 - DNA, 16 bp, synthetic construct
  misc_feature 1..16: note = synthetic [barcode part1]
  source 1..16: mol_type = other DNA
acggagtacagtagag

SEQ ID NO: 45124 - DNA, 16 bp, synthetic construct
  misc_feature 1..16: note = synthetic [barcode part1]
  source 1..16: mol_type = other DNA
gagtcagtggttatag

SEQ ID NO: 45125 - DNA, 16 bp, synthetic construct
  misc_feature 1..16: note = synthetic [barcode part1]
  source 1..16: mol_type = other DNA
ttaacgacctgtacct

SEQ ID NO: 45126 - DNA, 16 bp, synthetic construct
  misc_feature 1..16: note = synthetic [barcode part1]
  source 1..16: mol_type = other DNA
acaacgtgttgactgc

SEQ ID NO: 45127 - DNA, 12 bp, synthetic construct
  misc_feature 1..12: note = synthetic [barcode part2]
  source 1..12: mol_type = other DNA
agtcgtgccgat

SEQ ID NO: 45128 - DNA, 12 bp, synthetic construct
  misc_feature 1..12: note = synthetic [barcode part2]
  source 1..12: mol_type = other DNA
tgccaatagttg

SEQ ID NO: 45129 - DNA, 12 bp, synthetic construct
  misc_feature 1..12: note = synthetic [barcode part2]
  source 1..12: mol_type = other DNA
caatgcgcgact

SEQ ID NO: 45130 - DNA, 12 bp, synthetic construct
  misc_feature 1..12: note = synthetic [barcode part2]
  source 1..12: mol_type = other DNA
atgaactaccgt

SEQ ID NO: 45131 - DNA, 12 bp, synthetic construct
  misc_feature 1..12: note = synthetic [barcode part2]
  source 1..12: mol_type = other DNA
acaccgacgact

SEQ ID NO: 45132 - DNA, 12 bp, synthetic construct
  misc_feature 1..12: note = synthetic [barcode part2]
  source 1..12: mol_type = other DNA
aatcgtgtcaac

SEQ ID NO: 45133 - DNA, 12 bp, synthetic construct
  misc_feature 1..12: note = synthetic [barcode part2]
  source 1..12: mol_type = other DNA
tcgagttgtatg

SEQ ID NO: 45134 - DNA, 12 bp, synthetic construct
  misc_feature 1..12: note = synthetic [barcode part2]
  source 1..12: mol_type = other DNA
ttctagtgtcgc

SEQ ID NO: 45135 - DNA, 12 bp, synthetic construct
  misc_feature 1..12: note = synthetic [barcode part2]
  source 1..12: mol_type = other DNA
ttcaatctcggc

SEQ ID NO: 45136 - DNA, 12 bp, synthetic construct
  misc_feature 1..12: note = synthetic [barcode part2]
  source 1..12: mol_type = other DNA
ccaacatggtcg

SEQ ID NO: 45137 - DNA, 12 bp, synthetic construct
  misc_feature 1..12: note = synthetic [barcode part2]
  source 1..12: mol_type = other DNA
atgatcaccagt

SEQ ID NO: 45138 - DNA, 12 bp, synthetic construct
  misc_feature 1..12: note = synthetic [barcode part2]
  source 1..12: mol_type = other DNA
tctagttccgac

SEQ ID NO: 45139 - DNA, 12 bp, synthetic construct
  misc_feature 1..12: note = synthetic [barcode part2]
  source 1..12: mol_type = other DNA
taatctctcggc

SEQ ID NO: 45140 - DNA, 12 bp, synthetic construct
  misc_feature 1..12: note = synthetic [barcode part2]
  source 1..12: mol_type = other DNA
ttctgtacgcac

SEQ ID NO: 45141 - DNA, 12 bp, synthetic construct
  misc_feature 1..12: note = synthetic [barcode part2]
  source 1..12: mol_type = other DNA
tcttgcgatgtc

SEQ ID NO: 45142 - DNA, 12 bp, synthetic construct
  misc_feature 1..12: note = synthetic [barcode part2]
  source 1..12: mol_type = other DNA
cacaccgaactg

SEQ ID NO: 45143 - DNA, 12 bp, synthetic construct
  misc_feature 1..12: note = synthetic [barcode part2]
  source 1..12: mol_type = other DNA
tcggattgtgcg

SEQ ID NO: 45144 - DNA, 12 bp, synthetic construct
  misc_feature 1..12: note = synthetic [barcode part2]
  source 1..12: mol_type = other DNA
taacgcacaatc

SEQ ID NO: 45145 - DNA, 12 bp, synthetic construct
  misc_feature 1..12: note = synthetic [barcode part2]
  source 1..12: mol_type = other DNA
caacttctcggt

SEQ ID NO: 45146 - DNA, 12 bp, synthetic construct
  misc_feature 1..12: note = synthetic [barcode part2]
  source 1..12: mol_type = other DNA
agtctggtgcgt

SEQ ID NO: 45147 - DNA, 12 bp, synthetic construct
  misc_feature 1..12: note = synthetic [barcode part2]
  source 1..12: mol_type = other DNA
caacggtcacgt

SEQ ID NO: 45148 - DNA, 12 bp, synthetic construct
  misc_feature 1..12: note = synthetic [barcode part2]
  source 1..12: mol_type = other DNA
attgcaccgacg

SEQ ID NO: 45149 - DNA, 12 bp, synthetic construct
  misc_feature 1..12: note = synthetic [barcode part2]
  source 1..12: mol_type = other DNA
ttcgccagttac

SEQ ID NO: 45150 - DNA, 12 bp, synthetic construct
  misc_feature 1..12: note = synthetic [barcode part2]
  source 1..12: mol_type = other DNA
aacggtccatat

SEQ ID NO: 45151 - DNA, 12 bp, synthetic construct
  misc_feature 1..12: note = synthetic [barcode part2]
  source 1..12: mol_type = other DNA
tagaccgcatat

SEQ ID NO: 45152 - DNA, 12 bp, synthetic construct
  misc_feature 1..12: note = synthetic [barcode part2]
  source 1..12: mol_type = other DNA
ataccgacaatc

SEQ ID NO: 45153 - DNA, 12 bp, synthetic construct
  misc_feature 1..12: note = synthetic [barcode part2]
  source 1..12: mol_type = other DNA
atgtgatctggt

SEQ ID NO: 45154 - DNA, 12 bp, synthetic construct
  misc_feature 1..12: note = synthetic [barcode part2]
  source 1..12: mol_type = other DNA
atacttcgcgtc

SEQ ID NO: 45155 - DNA, 12 bp, synthetic construct
  misc_feature 1..12: note = synthetic [barcode part2]
  source 1..12: mol_type = other DNA
tatgcgtctctg

SEQ ID NO: 45156 - DNA, 12 bp, synthetic construct
  misc_feature 1..12: note = synthetic [barcode part2]
  source 1..12: mol_type = other DNA
caagtgccgact

SEQ ID NO: 45157 - DNA, 12 bp, synthetic construct
  misc_feature 1..12: note = synthetic [barcode part2]
  source 1..12: mol_type = other DNA
tccggtcttagt

SEQ ID NO: 45158 - DNA, 12 bp, synthetic construct
  misc_feature 1..12: note = synthetic [barcode part2]
  source 1..12: mol_type = other DNA
cgtacatcttcg

SEQ ID NO: 45159 - DNA, 12 bp, synthetic construct
  misc_feature 1..12: note = synthetic [barcode part2]
  source 1..12: mol_type = other DNA
tggatacaccgc

SEQ ID NO: 45160 - DNA, 12 bp, synthetic construct
  misc_feature 1..12: note = synthetic [barcode part2]
  source 1..12: mol_type = other DNA
tcgtagtcttcg

SEQ ID NO: 45161 - DNA, 12 bp, synthetic construct
  misc_feature 1..12: note = synthetic [barcode part2]
  source 1..12: mol_type = other DNA
aatggtctatgc

SEQ ID NO: 45162 - DNA, 12 bp, synthetic construct
  misc_feature 1..12: note = synthetic [barcode part2]
  source 1..12: mol_type = other DNA
cgatggccatac

SEQ ID NO: 45163 - DNA, 12 bp, synthetic construct
  misc_feature 1..12: note = synthetic [barcode part2]
  source 1..12: mol_type = other DNA
acgaccggattc

SEQ ID NO: 45164 - DNA, 12 bp, synthetic construct
  misc_feature 1..12: note = synthetic [barcode part2]
  source 1..12: mol_type = other DNA
tgcgagaacatg

SEQ ID NO: 45165 - DNA, 12 bp, synthetic construct
  misc_feature 1..12: note = synthetic [barcode part2]
  source 1..12: mol_type = other DNA
cgtgtattctcg

SEQ ID NO: 45166 - DNA, 12 bp, synthetic construct
  misc_feature 1..12: note = synthetic [barcode part2]
  source 1..12: mol_type = other DNA
agtcgcaccagt

SEQ ID NO: 45167 - DNA, 12 bp, synthetic construct
  misc_feature 1..12: note = synthetic [barcode part2]
  source 1..12: mol_type = other DNA
cgaatgtgccac

SEQ ID NO: 45168 - DNA, 12 bp, synthetic construct
  misc_feature 1..12: note = synthetic [barcode part2]
  source 1..12: mol_type = other DNA
aataatcgcgtc

SEQ ID NO: 45169 - DNA, 12 bp, synthetic construct
  misc_feature 1..12: note = synthetic [barcode part2]
  source 1..12: mol_type = other DNA
acgcggttcaac

SEQ ID NO: 45170 - DNA, 12 bp, synthetic construct
  misc_feature 1..12: note = synthetic [barcode part2]
  source 1..12: mol_type = other DNA
tgatgcgactat

SEQ ID NO: 45171 - DNA, 12 bp, synthetic construct
  misc_feature 1..12: note = synthetic [barcode part2]
  source 1..12: mol_type = other DNA
tgataaccgtgt

SEQ ID NO: 45172 - DNA, 12 bp, synthetic construct
  misc_feature 1..12: note = synthetic [barcode part2]
  source 1..12: mol_type = other DNA
cgttgtatctcg

SEQ ID NO: 45173 - DNA, 12 bp, synthetic construct
  misc_feature 1..12: note = synthetic [barcode part2]
  source 1..12: mol_type = other DNA
ttccgactgatc

SEQ ID NO: 45174 - DNA, 12 bp, synthetic construct
  misc_feature 1..12: note = synthetic [barcode part2]
  source 1..12: mol_type = other DNA
ttcgcactgtac

SEQ ID NO: 45175 - DNA, 12 bp, synthetic construct
  misc_feature 1..12: note = synthetic [barcode part2]
  source 1..12: mol_type = other DNA
tcgtcggatacg

SEQ ID NO: 45176 - DNA, 12 bp, synthetic construct
  misc_feature 1..12: note = synthetic [barcode part2]
  source 1..12: mol_type = other DNA
tggactatatgc

SEQ ID NO: 45177 - DNA, 12 bp, synthetic construct
  misc_feature 1..12: note = synthetic [barcode part2]
  source 1..12: mol_type = other DNA
ccaacgcaatcg

SEQ ID NO: 45178 - DNA, 12 bp, synthetic construct
  misc_feature 1..12: note = synthetic [barcode part2]
  source 1..12: mol_type = other DNA
aacggtctgcgt

SEQ ID NO: 45179 - DNA, 12 bp, synthetic construct
  misc_feature 1..12: note = synthetic [barcode part2]
  source 1..12: mol_type = other DNA
tggtgtaattgc

SEQ ID NO: 45180 - DNA, 12 bp, synthetic construct
  misc_feature 1..12: note = synthetic [barcode part2]
  source 1..12: mol_type = other DNA
caaccgagaagt

SEQ ID NO: 45181 - DNA, 12 bp, synthetic construct
  misc_feature 1..12: note = synthetic [barcode part2]
  source 1..12: mol_type = other DNA
cgatatggccac

SEQ ID NO: 45182 - DNA, 12 bp, synthetic construct
  misc_feature 1..12: note = synthetic [barcode part2]
  source 1..12: mol_type = other DNA
cgagtatactac

SEQ ID NO: 45183 - DNA, 12 bp, synthetic construct
  misc_feature 1..12: note = synthetic [barcode part2]
  source 1..12: mol_type = other DNA
aaccatatcggt

SEQ ID NO: 45184 - DNA, 12 bp, synthetic construct
  misc_feature 1..12: note = synthetic [barcode part2]
  source 1..12: mol_type = other DNA
tggcgcaactac

SEQ ID NO: 45185 - DNA, 12 bp, synthetic construct
  misc_feature 1..12: note = synthetic [barcode part2]
  source 1..12: mol_type = other DNA
caatgcgatcat

SEQ ID NO: 45186 - DNA, 12 bp, synthetic construct
  misc_feature 1..12: note = synthetic [barcode part2]
  source 1..12: mol_type = other DNA
tcggaagtgatg

SEQ ID NO: 45187 - DNA, 12 bp, synthetic construct
  misc_feature 1..12: note = synthetic [barcode part2]
  source 1..12: mol_type = other DNA
ttcgattccgac

SEQ ID NO: 45188 - DNA, 12 bp, synthetic construct
  misc_feature 1..12: note = synthetic [barcode part2]
  source 1..12: mol_type = other DNA
agtggtctgtat

SEQ ID NO: 45189 - DNA, 12 bp, synthetic construct
  misc_feature 1..12: note = synthetic [barcode part2]
  source 1..12: mol_type = other DNA
cgataacatgtc

SEQ ID NO: 45190 - DNA, 12 bp, synthetic construct
  misc_feature 1..12: note = synthetic [barcode part2]
  source 1..12: mol_type = other DNA
tattagtggtcg

SEQ ID NO: 45191 - DNA, 12 bp, synthetic construct
  misc_feature 1..12: note = synthetic [barcode part2]
  source 1..12: mol_type = other DNA
tattcaacggtg

SEQ ID NO: 45192 - DNA, 12 bp, synthetic construct
  misc_feature 1..12: note = synthetic [barcode part2]
  source 1..12: mol_type = other DNA
agagtcgcaatg

SEQ ID NO: 45193 - DNA, 12 bp, synthetic construct
  misc_feature 1..12: note = synthetic [barcode part2]
  source 1..12: mol_type = other DNA
tggcgcatgatc

SEQ ID NO: 45194 - DNA, 12 bp, synthetic construct
  misc_feature 1..12: note = synthetic [barcode part2]
  source 1..12: mol_type = other DNA
tgagagactggt

SEQ ID NO: 45195 - DNA, 12 bp, synthetic construct
  misc_feature 1..12: note = synthetic [barcode part2]
  source 1..12: mol_type = other DNA
tgatgcggtcgt

SEQ ID NO: 45196 - DNA, 12 bp, synthetic construct
  misc_feature 1..12: note = synthetic [barcode part2]
  source 1..12: mol_type = other DNA
tcgcgtgaactg

SEQ ID NO: 45197 - DNA, 12 bp, synthetic construct
  misc_feature 1..12: note = synthetic [barcode part2]
  source 1..12: mol_type = other DNA
accattgatgtg

SEQ ID NO: 45198 - DNA, 12 bp, synthetic construct
  misc_feature 1..12: note = synthetic [barcode part2]
  source 1..12: mol_type = other DNA
attataccggtg

SEQ ID NO: 45199 - DNA, 12 bp, synthetic construct
  misc_feature 1..12: note = synthetic [barcode part2]
  source 1..12: mol_type = other DNA
acgaatccggtc

SEQ ID NO: 45200 - DNA, 12 bp, synthetic construct
  misc_feature 1..12: note = synthetic [barcode part2]
  source 1..12: mol_type = other DNA
accatcaatacg

SEQ ID NO: 45201 - DNA, 12 bp, synthetic construct
  misc_feature 1..12: note = synthetic [barcode part2]
  source 1..12: mol_type = other DNA
tgacaatcacgt

SEQ ID NO: 45202 - DNA, 12 bp, synthetic construct
  misc_feature 1..12: note = synthetic [barcode part2]
  source 1..12: mol_type = other DNA
aatggtccgcac

SEQ ID NO: 45203 - DNA, 12 bp, synthetic construct
  misc_feature 1..12: note = synthetic [barcode part2]
  source 1..12: mol_type = other DNA
tggattgcacgc

SEQ ID NO: 45204 - DNA, 12 bp, synthetic construct
  misc_feature 1..12: note = synthetic [barcode part2]
  source 1..12: mol_type = other DNA
acatgatggtct

SEQ ID NO: 45205 - DNA, 12 bp, synthetic construct
  misc_feature 1..12: note = synthetic [barcode part2]
  source 1..12: mol_type = other DNA
tagagagtcggt

SEQ ID NO: 45206 - DNA, 12 bp, synthetic construct
  misc_feature 1..12: note = synthetic [barcode part2]
  source 1..12: mol_type = other DNA
aatgaagaccgc

SEQ ID NO: 45207 - DNA, 12 bp, synthetic construct
  misc_feature 1..12: note = synthetic [barcode part2]
  source 1..12: mol_type = other DNA
taatgatgcgtc

SEQ ID NO: 45208 - DNA, 12 bp, synthetic construct
  misc_feature 1..12: note = synthetic [barcode part2]
  source 1..12: mol_type = other DNA
accatgtcggtg

SEQ ID NO: 45209 - DNA, 12 bp, synthetic construct
  misc_feature 1..12: note = synthetic [barcode part2]
  source 1..12: mol_type = other DNA
tcgtctctaacg

SEQ ID NO: 45210 - DNA, 12 bp, synthetic construct
  misc_feature 1..12: note = synthetic [barcode part2]
  source 1..12: mol_type = other DNA
accagttctctg

SEQ ID NO: 45211 - DNA, 12 bp, synthetic construct
  misc_feature 1..12: note = synthetic [barcode part2]
  source 1..12: mol_type = other DNA
taacaatcgcac

SEQ ID NO: 45212 - DNA, 12 bp, synthetic construct
  misc_feature 1..12: note = synthetic [barcode part2]
  source 1..12: mol_type = other DNA
accattggcacg

SEQ ID NO: 45213 - DNA, 12 bp, synthetic construct
  misc_feature 1..12: note = synthetic [barcode part2]
  source 1..12: mol_type = other DNA
tgcgttaagttg

SEQ ID NO: 45214 - DNA, 12 bp, synthetic construct
  misc_feature 1..12: note = synthetic [barcode part2]
  source 1..12: mol_type = other DNA
taatatgaccgc

SEQ ID NO: 45215 - DNA, 12 bp, synthetic construct
  misc_feature 1..12: note = synthetic [barcode part2]
  source 1..12: mol_type = other DNA
tggatgtgtcgc

SEQ ID NO: 45216 - DNA, 12 bp, synthetic construct
  misc_feature 1..12: note = synthetic [barcode part2]
  source 1..12: mol_type = other DNA
cacgtcgaatcg

SEQ ID NO: 45217 - DNA, 12 bp, synthetic construct
  misc_feature 1..12: note = synthetic [barcode part2]
  source 1..12: mol_type = other DNA
taagtcgtacac

SEQ ID NO: 45218 - DNA, 12 bp, synthetic construct
  misc_feature 1..12: note = synthetic [barcode part2]
  source 1..12: mol_type = other DNA
aaccgtgccagt

SEQ ID NO: 45219 - DNA, 12 bp, synthetic construct
  misc_feature 1..12: note = synthetic [barcode part2]
  source 1..12: mol_type = other DNA
tgacggtcgtgt

SEQ ID NO: 45220 - DNA, 12 bp, synthetic construct
  misc_feature 1..12: note = synthetic [barcode part2]
  source 1..12: mol_type = other DNA
tctccagttgac

SEQ ID NO: 45221 - DNA, 12 bp, synthetic construct
  misc_feature 1..12: note = synthetic [barcode part2]
  source 1..12: mol_type = other DNA
tgactctccagt

SEQ ID NO: 45222 - DNA, 12 bp, synthetic construct
  misc_feature 1..12: note = synthetic [barcode part2]
  source 1..12: mol_type = other DNA
aactgcgtcggt

SEQ ID NO: 45223 - DNA, 12 bp, synthetic construct
  misc_feature 1..12: note = synthetic [barcode part2]
  source 1..12: mol_type = other DNA
cagaatcgagac

SEQ ID NO: 45224 - DNA, 12 bp, synthetic construct
  misc_feature 1..12: note = synthetic [barcode part2]
  source 1..12: mol_type = other DNA
tcggcgtaactg

SEQ ID NO: 45225 - DNA, 12 bp, synthetic construct
  misc_feature 1..12: note = synthetic [barcode part2]
  source 1..12: mol_type = other DNA
ttacatagaccg

SEQ ID NO: 45226 - DNA, 12 bp, synthetic construct
  misc_feature 1..12: note = synthetic [barcode part2]
  source 1..12: mol_type = other DNA
cggtgattacat

SEQ ID NO: 45227 - DNA, 12 bp, synthetic construct
  misc_feature 1..12: note = synthetic [barcode part2]
  source 1..12: mol_type = other DNA
tctgcgttgtac

SEQ ID NO: 45228 - DNA, 12 bp, synthetic construct
  misc_feature 1..12: note = synthetic [barcode part2]
  source 1..12: mol_type = other DNA
taacgaccacgc

SEQ ID NO: 45229 - DNA, 12 bp, synthetic construct
  misc_feature 1..12: note = synthetic [barcode part2]
  source 1..12: mol_type = other DNA
agtccgatacat

SEQ ID NO: 45230 - DNA, 12 bp, synthetic construct
  misc_feature 1..12: note = synthetic [barcode part2]
  source 1..12: mol_type = other DNA
agtagttcgtgt

SEQ ID NO: 45231 - DNA, 12 bp, synthetic construct
  misc_feature 1..12: note = synthetic [barcode part2]
  source 1..12: mol_type = other DNA
cgaactatgtac

SEQ ID NO: 45232 - DNA, 12 bp, synthetic construct
  misc_feature 1..12: note = synthetic [barcode part2]
  source 1..12: mol_type = other DNA
aataactcgcac

SEQ ID NO: 45233 - DNA, 12 bp, synthetic construct
  misc_feature 1..12: note = synthetic [barcode part2]
  source 1..12: mol_type = other DNA
ccacaatcttcg

SEQ ID NO: 45234 - DNA, 12 bp, synthetic construct
  misc_feature 1..12: note = synthetic [barcode part2]
  source 1..12: mol_type = other DNA
tcggtatagttg

SEQ ID NO: 45235 - DNA, 12 bp, synthetic construct
  misc_feature 1..12: note = synthetic [barcode part2]
  source 1..12: mol_type = other DNA
cgacatacaatc

SEQ ID NO: 45236 - DNA, 12 bp, synthetic construct
  misc_feature 1..12: note = synthetic [barcode part2]
  source 1..12: mol_type = other DNA
tagacataccgt

SEQ ID NO: 45237 - DNA, 12 bp, synthetic construct
  misc_feature 1..12: note = synthetic [barcode part2]
  source 1..12: mol_type = other DNA
agtaccgtctct

SEQ ID NO: 45238 - DNA, 12 bp, synthetic construct
  misc_feature 1..12: note = synthetic [barcode part2]
  source 1..12: mol_type = other DNA
tggacattagtc

SEQ ID NO: 45239 - DNA, 12 bp, synthetic construct
  misc_feature 1..12: note = synthetic [barcode part2]
  source 1..12: mol_type = other DNA
aacacatggtct

SEQ ID NO: 45240 - DNA, 12 bp, synthetic construct
  misc_feature 1..12: note = synthetic [barcode part2]
  source 1..12: mol_type = other DNA
tcgatacggtcg

SEQ ID NO: 45241 - DNA, 12 bp, synthetic construct
  misc_feature 1..12: note = synthetic [barcode part2]
  source 1..12: mol_type = other DNA
tggtctctcaac

SEQ ID NO: 45242 - DNA, 12 bp, synthetic construct
  misc_feature 1..12: note = synthetic [barcode part2]
  source 1..12: mol_type = other DNA
tgcaacttaacg

SEQ ID NO: 45243 - DNA, 12 bp, synthetic construct
  misc_feature 1..12: note = synthetic [barcode part2]
  source 1..12: mol_type = other DNA
cgagagactaac

SEQ ID NO: 45244 - DNA, 12 bp, synthetic construct
  misc_feature 1..12: note = synthetic [barcode part2]
  source 1..12: mol_type = other DNA
ccagaccatgtg

SEQ ID NO: 45245 - DNA, 12 bp, synthetic construct
  misc_feature 1..12: note = synthetic [barcode part2]
  source 1..12: mol_type = other DNA
tatcgacggtcg

SEQ ID NO: 45246 - DNA, 12 bp, synthetic construct
  misc_feature 1..12: note = synthetic [barcode part2]
  source 1..12: mol_type = other DNA
agaattgcgacg

SEQ ID NO: 45247 - DNA, 12 bp, synthetic construct
  misc_feature 1..12: note = synthetic [barcode part2]
  source 1..12: mol_type = other DNA
acgaatcgccac

SEQ ID NO: 45248 - DNA, 12 bp, synthetic construct
  misc_feature 1..12: note = synthetic [barcode part2]
  source 1..12: mol_type = other DNA
ttagtgcgaccg

SEQ ID NO: 45249 - DNA, 12 bp, synthetic construct
  misc_feature 1..12: note = synthetic [barcode part2]
  source 1..12: mol_type = other DNA
tagtgatcacgt

SEQ ID NO: 45250 - DNA, 12 bp, synthetic construct
  misc_feature 1..12: note = synthetic [barcode part2]
  source 1..12: mol_type = other DNA
atggcacgagat

SEQ ID NO: 45251 - DNA, 12 bp, synthetic construct
  misc_feature 1..12: note = synthetic [barcode part2]
  source 1..12: mol_type = other DNA
tctgtatcgtgc

SEQ ID NO: 45252 - DNA, 12 bp, synthetic construct
  misc_feature 1..12: note = synthetic [barcode part2]
  source 1..12: mol_type = other DNA
ttccgcagtatc

SEQ ID NO: 45253 - DNA, 12 bp, synthetic construct
  misc_feature 1..12: note = synthetic [barcode part2]
  source 1..12: mol_type = other DNA
aactgtactggt

SEQ ID NO: 45254 - DNA, 12 bp, synthetic construct
  misc_feature 1..12: note = synthetic [barcode part2]
  source 1..12: mol_type = other DNA
tggcaatcgtgc

SEQ ID NO: 45255 - DNA, 12 bp, synthetic construct
  misc_feature 1..12: note = synthetic [barcode part2]
  source 1..12: mol_type = other DNA
tattgatgaccg

SEQ ID NO: 45256 - DNA, 12 bp, synthetic construct
  misc_feature 1..12: note = synthetic [barcode part2]
  source 1..12: mol_type = other DNA
cgagtgcgttac

SEQ ID NO: 45257 - DNA, 12 bp, synthetic construct
  misc_feature 1..12: note = synthetic [barcode part2]
  source 1..12: mol_type = other DNA
attccgacttcg

SEQ ID NO: 45258 - DNA, 12 bp, synthetic construct
  misc_feature 1..12: note = synthetic [barcode part2]
  source 1..12: mol_type = other DNA
cacgtatcttcg

SEQ ID NO: 45259 - DNA, 12 bp, synthetic construct
  misc_feature 1..12: note = synthetic [barcode part2]
  source 1..12: mol_type = other DNA
ataaccgccgac

SEQ ID NO: 45260 - DNA, 12 bp, synthetic construct
  misc_feature 1..12: note = synthetic [barcode part2]
  source 1..12: mol_type = other DNA
tcggtatgaccg

SEQ ID NO: 45261 - DNA, 12 bp, synthetic construct
  misc_feature 1..12: note = synthetic [barcode part2]
  source 1..12: mol_type = other DNA
tctgcaccatac

SEQ ID NO: 45262 - DNA, 12 bp, synthetic construct
  misc_feature 1..12: note = synthetic [barcode part2]
  source 1..12: mol_type = other DNA
atactggtagtc

SEQ ID NO: 45263 - DNA, 12 bp, synthetic construct
  misc_feature 1..12: note = synthetic [barcode part2]
  source 1..12: mol_type = other DNA
cgtggtctgatg

SEQ ID NO: 45264 - DNA, 12 bp, synthetic construct
  misc_feature 1..12: note = synthetic [barcode part2]
  source 1..12: mol_type = other DNA
tcgtgcggattg

SEQ ID NO: 45265 - DNA, 12 bp, synthetic construct
  misc_feature 1..12: note = synthetic [barcode part2]
  source 1..12: mol_type = other DNA
atgtggcggtct

SEQ ID NO: 45266 - DNA, 12 bp, synthetic construct
  misc_feature 1..12: note = synthetic [barcode part2]
  source 1..12: mol_type = other DNA
cgaatgtcggtc

SEQ ID NO: 45267 - DNA, 12 bp, synthetic construct
  misc_feature 1..12: note = synthetic [barcode part2]
  source 1..12: mol_type = other DNA
tatccgatgatg

SEQ ID NO: 45268 - DNA, 12 bp, synthetic construct
  misc_feature 1..12: note = synthetic [barcode part2]
  source 1..12: mol_type = other DNA
cgactctagttc

SEQ ID NO: 45269 - DNA, 12 bp, synthetic construct
  misc_feature 1..12: note = synthetic [barcode part2]
  source 1..12: mol_type = other DNA
cagaccgtgtac

SEQ ID NO: 45270 - DNA, 12 bp, synthetic construct
  misc_feature 1..12: note = synthetic [barcode part2]
  source 1..12: mol_type = other DNA
cgatgattgtac

SEQ ID NO: 45271 - DNA, 12 bp, synthetic construct
  misc_feature 1..12: note = synthetic [barcode part2]
  source 1..12: mol_type = other DNA
cacagttcggtg

SEQ ID NO: 45272 - DNA, 12 bp, synthetic construct
  misc_feature 1..12: note = synthetic [barcode part2]
  source 1..12: mol_type = other DNA
tctggtcaactc

SEQ ID NO: 45273 - DNA, 12 bp, synthetic construct
  misc_feature 1..12: note = synthetic [barcode part2]
  source 1..12: mol_type = other DNA
tcggagacaatg

SEQ ID NO: 45274 - DNA, 12 bp, synthetic construct
  misc_feature 1..12: note = synthetic [barcode part2]
  source 1..12: mol_type = other DNA
cgaatactagtc

SEQ ID NO: 45275 - DNA, 12 bp, synthetic construct
  misc_feature 1..12: note = synthetic [barcode part2]
  source 1..12: mol_type = other DNA
caataaccacgt

SEQ ID NO: 45276 - DNA, 12 bp, synthetic construct
  misc_feature 1..12: note = synthetic [barcode part2]
  source 1..12: mol_type = other DNA
aatgcactcggc

SEQ ID NO: 45277 - DNA, 12 bp, synthetic construct
  misc_feature 1..12: note = synthetic [barcode part2]
  source 1..12: mol_type = other DNA
ttcgtcgtagtc

SEQ ID NO: 45278 - DNA, 12 bp, synthetic construct
  misc_feature 1..12: note = synthetic [barcode part2]
  source 1..12: mol_type = other DNA
accactagtatg

SEQ ID NO: 45279 - DNA, 12 bp, synthetic construct
  misc_feature 1..12: note = synthetic [barcode part2]
  source 1..12: mol_type = other DNA
cgacaattgcgc

SEQ ID NO: 45280 - DNA, 12 bp, synthetic construct
  misc_feature 1..12: note = synthetic [barcode part2]
  source 1..12: mol_type = other DNA
tatgagaacgcg

SEQ ID NO: 45281 - DNA, 12 bp, synthetic construct
  misc_feature 1..12: note = synthetic [barcode part2]
  source 1..12: mol_type = other DNA
tgccgacaatcg

SEQ ID NO: 45282 - DNA, 12 bp, synthetic construct
  misc_feature 1..12: note = synthetic [barcode part2]
  source 1..12: mol_type = other DNA
cagtaaccgtgc

SEQ ID NO: 45283 - DNA, 12 bp, synthetic construct
  misc_feature 1..12: note = synthetic [barcode part2]
  source 1..12: mol_type = other DNA
acaaccgaatct

SEQ ID NO: 45284 - DNA, 12 bp, synthetic construct
  misc_feature 1..12: note = synthetic [barcode part2]
  source 1..12: mol_type = other DNA
agtgaccatact

SEQ ID NO: 45285 - DNA, 12 bp, synthetic construct
  misc_feature 1..12: note = synthetic [barcode part2]
  source 1..12: mol_type = other DNA
aaccgcaccgat

SEQ ID NO: 45286 - DNA, 12 bp, synthetic construct
  misc_feature 1..12: note = synthetic [barcode part2]
  source 1..12: mol_type = other DNA
agagaccaactg

SEQ ID NO: 45287 - DNA, 12 bp, synthetic construct
  misc_feature 1..12: note = synthetic [barcode part2]
  source 1..12: mol_type = other DNA
tccgagacttct

SEQ ID NO: 45288 - DNA, 12 bp, synthetic construct
  misc_feature 1..12: note = synthetic [barcode part2]
  source 1..12: mol_type = other DNA
ttcaactctggc

SEQ ID NO: 45289 - DNA, 12 bp, synthetic construct
  misc_feature 1..12: note = synthetic [barcode part2]
  source 1..12: mol_type = other DNA
caactctctggt

SEQ ID NO: 45290 - DNA, 12 bp, synthetic construct
  misc_feature 1..12: note = synthetic [barcode part2]
  source 1..12: mol_type = other DNA
agtggtccacgt

SEQ ID NO: 45291 - DNA, 12 bp, synthetic construct
  misc_feature 1..12: note = synthetic [barcode part2]
  source 1..12: mol_type = other DNA
acactaagtcgt

SEQ ID NO: 45292 - DNA, 12 bp, synthetic construct
  misc_feature 1..12: note = synthetic [barcode part2]
  source 1..12: mol_type = other DNA
tatactagaccg

SEQ ID NO: 45293 - DNA, 12 bp, synthetic construct
  misc_feature 1..12: note = synthetic [barcode part2]
  source 1..12: mol_type = other DNA
tcgatcacttcg

SEQ ID NO: 45294 - DNA, 12 bp, synthetic construct
  misc_feature 1..12: note = synthetic [barcode part2]
  source 1..12: mol_type = other DNA
atattagaccgc

SEQ ID NO: 45295 - DNA, 12 bp, synthetic construct
  misc_feature 1..12: note = synthetic [barcode part2]
  source 1..12: mol_type = other DNA
cagtagtcgcac

SEQ ID NO: 45296 - DNA, 12 bp, synthetic construct
  misc_feature 1..12: note = synthetic [barcode part2]
  source 1..12: mol_type = other DNA
aactatgccgat

SEQ ID NO: 45297 - DNA, 12 bp, synthetic construct
  misc_feature 1..12: note = synthetic [barcode part2]
  source 1..12: mol_type = other DNA
caccggtagttg

SEQ ID NO: 45298 - DNA, 12 bp, synthetic construct
  misc_feature 1..12: note = synthetic [barcode part2]
  source 1..12: mol_type = other DNA
tctccgaagttc

SEQ ID NO: 45299 - DNA, 12 bp, synthetic construct
  misc_feature 1..12: note = synthetic [barcode part2]
  source 1..12: mol_type = other DNA
tcgatgtaatcg

SEQ ID NO: 45300 - DNA, 12 bp, synthetic construct
  misc_feature 1..12: note = synthetic [barcode part2]
  source 1..12: mol_type = other DNA
atactaacggtc

SEQ ID NO: 45301 - DNA, 12 bp, synthetic construct
  misc_feature 1..12: note = synthetic [barcode part2]
  source 1..12: mol_type = other DNA
cggtagttgtat

SEQ ID NO: 45302 - DNA, 12 bp, synthetic construct
  misc_feature 1..12: note = synthetic [barcode part2]
  source 1..12: mol_type = other DNA
tgcatgtctctg

SEQ ID NO: 45303 - DNA, 12 bp, synthetic construct
  misc_feature 1..12: note = synthetic [barcode part2]
  source 1..12: mol_type = other DNA
tagacgcactat

SEQ ID NO: 45304 - DNA, 12 bp, synthetic construct
  misc_feature 1..12: note = synthetic [barcode part2]
  source 1..12: mol_type = other DNA
acgatacggaac

SEQ ID NO: 45305 - DNA, 12 bp, synthetic construct
  misc_feature 1..12: note = synthetic [barcode part2]
  source 1..12: mol_type = other DNA
tggatgttgatc

SEQ ID NO: 45306 - DNA, 12 bp, synthetic construct
  misc_feature 1..12: note = synthetic [barcode part2]
  source 1..12: mol_type = other DNA
cactcggcaatg

SEQ ID NO: 45307 - DNA, 12 bp, synthetic construct
  misc_feature 1..12: note = synthetic [barcode part2]
  source 1..12: mol_type = other DNA
aacacattcggt

SEQ ID NO: 45308 - DNA, 12 bp, synthetic construct
  misc_feature 1..12: note = synthetic [barcode part2]
  source 1..12: mol_type = other DNA
tggcggtgtatc

SEQ ID NO: 45309 - DNA, 12 bp, synthetic construct
  misc_feature 1..12: note = synthetic [barcode part2]
  source 1..12: mol_type = other DNA
tggcaatgcgtc

SEQ ID NO: 45310 - DNA, 12 bp, synthetic construct
  misc_feature 1..12: note = synthetic [barcode part2]
  source 1..12: mol_type = other DNA
acacaatctggt

SEQ ID NO: 45311 - DNA, 12 bp, synthetic construct
  misc_feature 1..12: note = synthetic [barcode part2]
  source 1..12: mol_type = other DNA
cactgtacttcg

SEQ ID NO: 45312 - DNA, 12 bp, synthetic construct
  misc_feature 1..12: note = synthetic [barcode part2]
  source 1..12: mol_type = other DNA
tagtgtagtcgt

SEQ ID NO: 45313 - DNA, 12 bp, synthetic construct
  misc_feature 1..12: note = synthetic [barcode part2]
  source 1..12: mol_type = other DNA
atagtgcgagac

SEQ ID NO: 45314 - DNA, 12 bp, synthetic construct
  misc_feature 1..12: note = synthetic [barcode part2]
  source 1..12: mol_type = other DNA
cgacaatacatc

SEQ ID NO: 45315 - DNA, 12 bp, synthetic construct
  misc_feature 1..12: note = synthetic [barcode part2]
  source 1..12: mol_type = other DNA
cgataactatgc

SEQ ID NO: 45316 - DNA, 12 bp, synthetic construct
  misc_feature 1..12: note = synthetic [barcode part2]
  source 1..12: mol_type = other DNA
cggtaaccatat

SEQ ID NO: 45317 - DNA, 12 bp, synthetic construct
  misc_feature 1..12: note = synthetic [barcode part2]
  source 1..12: mol_type = other DNA
aatggtcatgtc

SEQ ID NO: 45318 - DNA, 12 bp, synthetic construct
  misc_feature 1..12: note = synthetic [barcode part2]
  source 1..12: mol_type = other DNA
tccagttggtct

SEQ ID NO: 45319 - DNA, 12 bp, synthetic construct
  misc_feature 1..12: note = synthetic [barcode part2]
  source 1..12: mol_type = other DNA
cgttagtgaccg

SEQ ID NO: 45320 - DNA, 12 bp, synthetic construct
  misc_feature 1..12: note = synthetic [barcode part2]
  source 1..12: mol_type = other DNA
aagattgcggtg

SEQ ID NO: 45321 - DNA, 12 bp, synthetic construct
  misc_feature 1..12: note = synthetic [barcode part2]
  source 1..12: mol_type = other DNA
aatgagagtcgc

SEQ ID NO: 45322 - DNA, 12 bp, synthetic construct
  misc_feature 1..12: note = synthetic [barcode part2]
  source 1..12: mol_type = other DNA
tggacatatcac

SEQ ID NO: 45323 - DNA, 12 bp, synthetic construct
  misc_feature 1..12: note = synthetic [barcode part2]
  source 1..12: mol_type = other DNA
caccaatggtcg

SEQ ID NO: 45324 - DNA, 12 bp, synthetic construct
  misc_feature 1..12: note = synthetic [barcode part2]
  source 1..12: mol_type = other DNA
tatagagacgcg

SEQ ID NO: 45325 - DNA, 12 bp, synthetic construct
  misc_feature 1..12: note = synthetic [barcode part2]
  source 1..12: mol_type = other DNA
acgccgatgatc

SEQ ID NO: 45326 - DNA, 12 bp, synthetic construct
  misc_feature 1..12: note = synthetic [barcode part2]
  source 1..12: mol_type = other DNA
cgatgcggttac

SEQ ID NO: 45327 - DNA, 12 bp, synthetic construct
  misc_feature 1..12: note = synthetic [barcode part2]
  source 1..12: mol_type = other DNA
tagtggccatat

SEQ ID NO: 45328 - DNA, 12 bp, synthetic construct
  misc_feature 1..12: note = synthetic [barcode part2]
  source 1..12: mol_type = other DNA
attatgtcgacg

SEQ ID NO: 45329 - DNA, 12 bp, synthetic construct
  misc_feature 1..12: note = synthetic [barcode part2]
  source 1..12: mol_type = other DNA
tctaacttcggc

SEQ ID NO: 45330 - DNA, 12 bp, synthetic construct
  misc_feature 1..12: note = synthetic [barcode part2]
  source 1..12: mol_type = other DNA
tctgtgcatgtc

SEQ ID NO: 45331 - DNA, 12 bp, synthetic construct
  misc_feature 1..12: note = synthetic [barcode part2]
  source 1..12: mol_type = other DNA
aaccacgtcaat

SEQ ID NO: 45332 - DNA, 12 bp, synthetic construct
  misc_feature 1..12: note = synthetic [barcode part2]
  source 1..12: mol_type = other DNA
cgatgtaactac

SEQ ID NO: 45333 - DNA, 12 bp, synthetic construct
  misc_feature 1..12: note = synthetic [barcode part2]
  source 1..12: mol_type = other DNA
aactctcgtcgt

SEQ ID NO: 45334 - DNA, 12 bp, synthetic construct
  misc_feature 1..12: note = synthetic [barcode part2]
  source 1..12: mol_type = other DNA
tgaatacgccat

SEQ ID NO: 45335 - DNA, 12 bp, synthetic construct
  misc_feature 1..12: note = synthetic [barcode part2]
  source 1..12: mol_type = other DNA
atacaatccgac

SEQ ID NO: 45336 - DNA, 12 bp, synthetic construct
  misc_feature 1..12: note = synthetic [barcode part2]
  source 1..12: mol_type = other DNA
tagtagtcgtgt

SEQ ID NO: 45337 - DNA, 12 bp, synthetic construct
  misc_feature 1..12: note = synthetic [barcode part2]
  source 1..12: mol_type = other DNA
aatctggtacac

SEQ ID NO: 45338 - DNA, 12 bp, synthetic construct
  misc_feature 1..12: note = synthetic [barcode part2]
  source 1..12: mol_type = other DNA
agagaagtctcg

SEQ ID NO: 45339 - DNA, 12 bp, synthetic construct
  misc_feature 1..12: note = synthetic [barcode part2]
  source 1..12: mol_type = other DNA
aagaccgcaatg

SEQ ID NO: 45340 - DNA, 12 bp, synthetic construct
  misc_feature 1..12: note = synthetic [barcode part2]
  source 1..12: mol_type = other DNA
tctactacggtc

SEQ ID NO: 45341 - DNA, 12 bp, synthetic construct
  misc_feature 1..12: note = synthetic [barcode part2]
  source 1..12: mol_type = other DNA
tccaactccgat

SEQ ID NO: 45342 - DNA, 12 bp, synthetic construct
  misc_feature 1..12: note = synthetic [barcode part2]
  source 1..12: mol_type = other DNA
tgactggagagt

SEQ ID NO: 45343 - DNA, 12 bp, synthetic construct
  misc_feature 1..12: note = synthetic [barcode part2]
  source 1..12: mol_type = other DNA
taacgcaaccgc

SEQ ID NO: 45344 - DNA, 12 bp, synthetic construct
  misc_feature 1..12: note = synthetic [barcode part2]
  source 1..12: mol_type = other DNA
tagacgcgtcgt

SEQ ID NO: 45345 - DNA, 12 bp, synthetic construct
  misc_feature 1..12: note = synthetic [barcode part2]
  source 1..12: mol_type = other DNA
cgaattgtatgc

SEQ ID NO: 45346 - DNA, 12 bp, synthetic construct
  misc_feature 1..12: note = synthetic [barcode part2]
  source 1..12: mol_type = other DNA
acgtcggtagtc

SEQ ID NO: 45347 - DNA, 12 bp, synthetic construct
  misc_feature 1..12: note = synthetic [barcode part2]
  source 1..12: mol_type = other DNA
tcgagttacgcg

SEQ ID NO: 45348 - DNA, 12 bp, synthetic construct
  misc_feature 1..12: note = synthetic [barcode part2]
  source 1..12: mol_type = other DNA
tccattgcgact

SEQ ID NO: 45349 - DNA, 12 bp, synthetic construct
  misc_feature 1..12: note = synthetic [barcode part2]
  source 1..12: mol_type = other DNA
attcgtgcggtg

SEQ ID NO: 45350 - DNA, 12 bp, synthetic construct
  misc_feature 1..12: note = synthetic [barcode part2]
  source 1..12: mol_type = other DNA
tcgtgtaagttg

SEQ ID NO: 45351 - DNA, 12 bp, synthetic construct
  misc_feature 1..12: note = synthetic [barcode part2]
  source 1..12: mol_type = other DNA
aactcggcatat

SEQ ID NO: 45352 - DNA, 12 bp, synthetic construct
  misc_feature 1..12: note = synthetic [barcode part2]
  source 1..12: mol_type = other DNA
cgagtatgtcgc

SEQ ID NO: 45353 - DNA, 12 bp, synthetic construct
  misc_feature 1..12: note = synthetic [barcode part2]
  source 1..12: mol_type = other DNA
tggactaatgtc

SEQ ID NO: 45354 - DNA, 12 bp, synthetic construct
  misc_feature 1..12: note = synthetic [barcode part2]
  source 1..12: mol_type = other DNA
aattcggcgcac

SEQ ID NO: 45355 - DNA, 12 bp, synthetic construct
  misc_feature 1..12: note = synthetic [barcode part2]
  source 1..12: mol_type = other DNA
cacggtccaatg

SEQ ID NO: 45356 - DNA, 12 bp, synthetic construct
  misc_feature 1..12: note = synthetic [barcode part2]
  source 1..12: mol_type = other DNA
agtcggtgagat

SEQ ID NO: 45357 - DNA, 12 bp, synthetic construct
  misc_feature 1..12: note = synthetic [barcode part2]
  source 1..12: mol_type = other DNA
taacatacggtc

SEQ ID NO: 45358 - DNA, 12 bp, synthetic construct
  misc_feature 1..12: note = synthetic [barcode part2]
  source 1..12: mol_type = other DNA
ttcatgtcacgc

SEQ ID NO: 45359 - DNA, 12 bp, synthetic construct
  misc_feature 1..12: note = synthetic [barcode part2]
  source 1..12: mol_type = other DNA
acgtagttcggc

SEQ ID NO: 45360 - DNA, 12 bp, synthetic construct
  misc_feature 1..12: note = synthetic [barcode part2]
  source 1..12: mol_type = other DNA
tgaactatgcgt

SEQ ID NO: 45361 - DNA, 12 bp, synthetic construct
  misc_feature 1..12: note = synthetic [barcode part2]
  source 1..12: mol_type = other DNA
atatcggattgc

SEQ ID NO: 45362 - DNA, 12 bp, synthetic construct
  misc_feature 1..12: note = synthetic [barcode part2]
  source 1..12: mol_type = other DNA
tggagagttgac

SEQ ID NO: 45363 - DNA, 12 bp, synthetic construct
  misc_feature 1..12: note = synthetic [barcode part2]
  source 1..12: mol_type = other DNA
tgcatgttctcg

SEQ ID NO: 45364 - DNA, 12 bp, synthetic construct
  misc_feature 1..12: note = synthetic [barcode part2]
  source 1..12: mol_type = other DNA
ttatctccgacg

SEQ ID NO: 45365 - DNA, 12 bp, synthetic construct
  misc_feature 1..12: note = synthetic [barcode part2]
  source 1..12: mol_type = other DNA
acacgacttagt

SEQ ID NO: 45366 - DNA, 12 bp, synthetic construct
  misc_feature 1..12: note = synthetic [barcode part2]
  source 1..12: mol_type = other DNA
aacgaccgcact

SEQ ID NO: 45367 - DNA, 12 bp, synthetic construct
  misc_feature 1..12: note = synthetic [barcode part2]
  source 1..12: mol_type = other DNA
tggcataatcac

SEQ ID NO: 45368 - DNA, 12 bp, synthetic construct
  misc_feature 1..12: note = synthetic [barcode part2]
  source 1..12: mol_type = other DNA
cacattggaccg

SEQ ID NO: 45369 - DNA, 12 bp, synthetic construct
  misc_feature 1..12: note = synthetic [barcode part2]
  source 1..12: mol_type = other DNA
tcgacatgattg

SEQ ID NO: 45370 - DNA, 12 bp, synthetic construct
  misc_feature 1..12: note = synthetic [barcode part2]
  source 1..12: mol_type = other DNA
caatgatcgcat

SEQ ID NO: 45371 - DNA, 12 bp, synthetic construct
  misc_feature 1..12: note = synthetic [barcode part2]
  source 1..12: mol_type = other DNA
tgacgtggccat

SEQ ID NO: 45372 - DNA, 12 bp, synthetic construct
  misc_feature 1..12: note = synthetic [barcode part2]
  source 1..12: mol_type = other DNA
tgagtgcgtcgt

SEQ ID NO: 45373 - DNA, 12 bp, synthetic construct
  misc_feature 1..12: note = synthetic [barcode part2]
  source 1..12: mol_type = other DNA
tatgtcggaccg

SEQ ID NO: 45374 - DNA, 12 bp, synthetic construct
  misc_feature 1..12: note = synthetic [barcode part2]
  source 1..12: mol_type = other DNA
tggtgcgatcac

SEQ ID NO: 45375 - DNA, 12 bp, synthetic construct
  misc_feature 1..12: note = synthetic [barcode part2]
  source 1..12: mol_type = other DNA
tggcggttgtac

SEQ ID NO: 45376 - DNA, 12 bp, synthetic construct
  misc_feature 1..12: note = synthetic [barcode part2]
  source 1..12: mol_type = other DNA
agtacgcggtct

SEQ ID NO: 45377 - DNA, 12 bp, synthetic construct
  misc_feature 1..12: note = synthetic [barcode part2]
  source 1..12: mol_type = other DNA
cgatatgcggtc

SEQ ID NO: 45378 - DNA, 12 bp, synthetic construct
  misc_feature 1..12: note = synthetic [barcode part2]
  source 1..12: mol_type = other DNA
ttcacgcatgtc

SEQ ID NO: 45379 - DNA, 12 bp, synthetic construct
  misc_feature 1..12: note = synthetic [barcode part2]
  source 1..12: mol_type = other DNA
tccgtcggttat

SEQ ID NO: 45380 - DNA, 12 bp, synthetic construct
  misc_feature 1..12: note = synthetic [barcode part2]
  source 1..12: mol_type = other DNA
caacatacgact

SEQ ID NO: 45381 - DNA, 12 bp, synthetic construct
  misc_feature 1..12: note = synthetic [barcode part2]
  source 1..12: mol_type = other DNA
cgaagttctctc

SEQ ID NO: 45382 - DNA, 12 bp, synthetic construct
  misc_feature 1..12: note = synthetic [barcode part2]
  source 1..12: mol_type = other DNA
tgaatgtcgact

SEQ ID NO: 45383 - DNA, 12 bp, synthetic construct
  misc_feature 1..12: note = synthetic [barcode part2]
  source 1..12: mol_type = other DNA
cggaccgtatgt

SEQ ID NO: 45384 - DNA, 12 bp, synthetic construct
  misc_feature 1..12: note = synthetic [barcode part2]
  source 1..12: mol_type = other DNA
tcgttagacgcg

SEQ ID NO: 45385 - DNA, 12 bp, synthetic construct
  misc_feature 1..12: note = synthetic [barcode part2]
  source 1..12: mol_type = other DNA
caaccagagagt

SEQ ID NO: 45386 - DNA, 12 bp, synthetic construct
  misc_feature 1..12: note = synthetic [barcode part2]
  source 1..12: mol_type = other DNA
ttatgcgagttg

SEQ ID NO: 45387 - DNA, 12 bp, synthetic construct
  misc_feature 1..12: note = synthetic [barcode part2]
  source 1..12: mol_type = other DNA
accgttagtgcg

SEQ ID NO: 45388 - DNA, 12 bp, synthetic construct
  misc_feature 1..12: note = synthetic [barcode part2]
  source 1..12: mol_type = other DNA
tataactcgacg

SEQ ID NO: 45389 - DNA, 12 bp, synthetic construct
  misc_feature 1..12: note = synthetic [barcode part2]
  source 1..12: mol_type = other DNA
atggtcgtcaat

SEQ ID NO: 45390 - DNA, 12 bp, synthetic construct
  misc_feature 1..12: note = synthetic [barcode part2]
  source 1..12: mol_type = other DNA
tccgcgttacat

SEQ ID NO: 45391 - DNA, 12 bp, synthetic construct
  misc_feature 1..12: note = synthetic [barcode part2]
  source 1..12: mol_type = other DNA
tggtacacaatc

SEQ ID NO: 45392 - DNA, 12 bp, synthetic construct
  misc_feature 1..12: note = synthetic [barcode part2]
  source 1..12: mol_type = other DNA
ttctcaatcggc

SEQ ID NO: 45393 - DNA, 12 bp, synthetic construct
  misc_feature 1..12: note = synthetic [barcode part2]
  source 1..12: mol_type = other DNA
tcggaccgtatg

SEQ ID NO: 45394 - DNA, 12 bp, synthetic construct
  misc_feature 1..12: note = synthetic [barcode part2]
  source 1..12: mol_type = other DNA
ccaatacgattg

SEQ ID NO: 45395 - DNA, 12 bp, synthetic construct
  misc_feature 1..12: note = synthetic [barcode part2]
  source 1..12: mol_type = other DNA
tagattggcact

SEQ ID NO: 45396 - DNA, 12 bp, synthetic construct
  misc_feature 1..12: note = synthetic [barcode part2]
  source 1..12: mol_type = other DNA
ttaccagacgcg

SEQ ID NO: 45397 - DNA, 12 bp, synthetic construct
  misc_feature 1..12: note = synthetic [barcode part2]
  source 1..12: mol_type = other DNA
cagacatgtcgc

SEQ ID NO: 45398 - DNA, 12 bp, synthetic construct
  misc_feature 1..12: note = synthetic [barcode part2]
  source 1..12: mol_type = other DNA
taactcttcggc

SEQ ID NO: 45399 - DNA, 12 bp, synthetic construct
  misc_feature 1..12: note = synthetic [barcode part2]
  source 1..12: mol_type = other DNA
tggatacgttac

SEQ ID NO: 45400 - DNA, 12 bp, synthetic construct
  misc_feature 1..12: note = synthetic [barcode part2]
  source 1..12: mol_type = other DNA
tctcgaccaatc

SEQ ID NO: 45401 - DNA, 12 bp, synthetic construct
  misc_feature 1..12: note = synthetic [barcode part2]
  source 1..12: mol_type = other DNA
cgaacatgttac

SEQ ID NO: 45402 - DNA, 12 bp, synthetic construct
  misc_feature 1..12: note = synthetic [barcode part2]
  source 1..12: mol_type = other DNA
caacaatcgtgt

SEQ ID NO: 45403 - DNA, 12 bp, synthetic construct
  misc_feature 1..12: note = synthetic [barcode part2]
  source 1..12: mol_type = other DNA
caacttcggtct

SEQ ID NO: 45404 - DNA, 12 bp, synthetic construct
  misc_feature 1..12: note = synthetic [barcode part2]
  source 1..12: mol_type = other DNA
acggattaccgc

SEQ ID NO: 45405 - DNA, 12 bp, synthetic construct
  misc_feature 1..12: note = synthetic [barcode part2]
  source 1..12: mol_type = other DNA
tagtgcggttat

SEQ ID NO: 45406 - DNA, 12 bp, synthetic construct
  misc_feature 1..12: note = synthetic [barcode part2]
  source 1..12: mol_type = other DNA
ttaatgtggtcg

SEQ ID NO: 45407 - DNA, 12 bp, synthetic construct
  misc_feature 1..12: note = synthetic [barcode part2]
  source 1..12: mol_type = other DNA
tgatgtaaccgt

SEQ ID NO: 45408 - DNA, 12 bp, synthetic construct
  misc_feature 1..12: note = synthetic [barcode part2]
  source 1..12: mol_type = other DNA
cgaagttggaac

SEQ ID NO: 45409 - DNA, 12 bp, synthetic construct
  misc_feature 1..12: note = synthetic [barcode part2]
  source 1..12: mol_type = other DNA
caagtcggcact

SEQ ID NO: 45410 - DNA, 12 bp, synthetic construct
  misc_feature 1..12: note = synthetic [barcode part2]
  source 1..12: mol_type = other DNA
tggtatgtgatc

SEQ ID NO: 45411 - DNA, 12 bp, synthetic construct
  misc_feature 1..12: note = synthetic [barcode part2]
  source 1..12: mol_type = other DNA
acgagagtgtac

SEQ ID NO: 45412 - DNA, 12 bp, synthetic construct
  misc_feature 1..12: note = synthetic [barcode part2]
  source 1..12: mol_type = other DNA
tgagtcgcatat

SEQ ID NO: 45413 - DNA, 12 bp, synthetic construct
  misc_feature 1..12: note = synthetic [barcode part2]
  source 1..12: mol_type = other DNA
atgcgacttgat

SEQ ID NO: 45414 - DNA, 12 bp, synthetic construct
  misc_feature 1..12: note = synthetic [barcode part2]
  source 1..12: mol_type = other DNA
ttaacgcgattg

SEQ ID NO: 45415 - DNA, 12 bp, synthetic construct
  misc_feature 1..12: note = synthetic [barcode part2]
  source 1..12: mol_type = other DNA
tctattggtcgc

SEQ ID NO: 45416 - DNA, 12 bp, synthetic construct
  misc_feature 1..12: note = synthetic [barcode part2]
  source 1..12: mol_type = other DNA
cagtctcgattc

SEQ ID NO: 45417 - DNA, 12 bp, synthetic construct
  misc_feature 1..12: note = synthetic [barcode part2]
  source 1..12: mol_type = other DNA
tggatcaacatc

SEQ ID NO: 45418 - DNA, 12 bp, synthetic construct
  misc_feature 1..12: note = synthetic [barcode part2]
  source 1..12: mol_type = other DNA
aacggaagtcgt

SEQ ID NO: 45419 - DNA, 12 bp, synthetic construct
  misc_feature 1..12: note = synthetic [barcode part2]
  source 1..12: mol_type = other DNA
acaatcaccgat

SEQ ID NO: 45420 - DNA, 12 bp, synthetic construct
  misc_feature 1..12: note = synthetic [barcode part2]
  source 1..12: mol_type = other DNA
atgtcaagtcgt

SEQ ID NO: 45421 - DNA, 12 bp, synthetic construct
  misc_feature 1..12: note = synthetic [barcode part2]
  source 1..12: mol_type = other DNA
tcgaactatacg

SEQ ID NO: 45422 - DNA, 12 bp, synthetic construct
  misc_feature 1..12: note = synthetic [barcode part2]
  source 1..12: mol_type = other DNA
atggaccattgt

SEQ ID NO: 45423 - DNA, 12 bp, synthetic construct
  misc_feature 1..12: note = synthetic [barcode part2]
  source 1..12: mol_type = other DNA
aatcataccgac

SEQ ID NO: 45424 - DNA, 12 bp, synthetic construct
  misc_feature 1..12: note = synthetic [barcode part2]
  source 1..12: mol_type = other DNA
cgacataaccgc

SEQ ID NO: 45425 - DNA, 12 bp, synthetic construct
  misc_feature 1..12: note = synthetic [barcode part2]
  source 1..12: mol_type = other DNA
attcgacgcacg

SEQ ID NO: 45426 - DNA, 12 bp, synthetic construct
  misc_feature 1..12: note = synthetic [barcode part2]
  source 1..12: mol_type = other DNA
taatggccgcac

SEQ ID NO: 45427 - DNA, 12 bp, synthetic construct
  misc_feature 1..12: note = synthetic [barcode part2]
  source 1..12: mol_type = other DNA
acatcggactat

SEQ ID NO: 45428 - DNA, 12 bp, synthetic construct
  misc_feature 1..12: note = synthetic [barcode part2]
  source 1..12: mol_type = other DNA
taagtgcgccac

SEQ ID NO: 45429 - DNA, 12 bp, synthetic construct
  misc_feature 1..12: note = synthetic [barcode part2]
  source 1..12: mol_type = other DNA
tgatgattgcgt

SEQ ID NO: 45430 - DNA, 12 bp, synthetic construct
  misc_feature 1..12: note = synthetic [barcode part2]
  source 1..12: mol_type = other DNA
tcttgcgtatgc

SEQ ID NO: 45431 - DNA, 12 bp, synthetic construct
  misc_feature 1..12: note = synthetic [barcode part2]
  source 1..12: mol_type = other DNA
tgagtgcactat

SEQ ID NO: 45432 - DNA, 12 bp, synthetic construct
  misc_feature 1..12: note = synthetic [barcode part2]
  source 1..12: mol_type = other DNA
tggtaaccacgc

SEQ ID NO: 45433 - DNA, 12 bp, synthetic construct
  misc_feature 1..12: note = synthetic [barcode part2]
  source 1..12: mol_type = other DNA
tggttgagagac

SEQ ID NO: 45434 - DNA, 12 bp, synthetic construct
  misc_feature 1..12: note = synthetic [barcode part2]
  source 1..12: mol_type = other DNA
cgacgcaattgc

SEQ ID NO: 45435 - DNA, 12 bp, synthetic construct
  misc_feature 1..12: note = synthetic [barcode part2]
  source 1..12: mol_type = other DNA
taatgcgcggtc

SEQ ID NO: 45436 - DNA, 12 bp, synthetic construct
  misc_feature 1..12: note = synthetic [barcode part2]
  source 1..12: mol_type = other DNA
cgataaccgcac

SEQ ID NO: 45437 - DNA, 12 bp, synthetic construct
  misc_feature 1..12: note = synthetic [barcode part2]
  source 1..12: mol_type = other DNA
cgagttaacatc

SEQ ID NO: 45438 - DNA, 12 bp, synthetic construct
  misc_feature 1..12: note = synthetic [barcode part2]
  source 1..12: mol_type = other DNA
ttcattgaccgc

SEQ ID NO: 45439 - DNA, 12 bp, synthetic construct
  misc_feature 1..12: note = synthetic [barcode part2]
  source 1..12: mol_type = other DNA
tcttagtaccgc

SEQ ID NO: 45440 - DNA, 12 bp, synthetic construct
  misc_feature 1..12: note = synthetic [barcode part2]
  source 1..12: mol_type = other DNA
ttaacatgaccg

SEQ ID NO: 45441 - DNA, 12 bp, synthetic construct
  misc_feature 1..12: note = synthetic [barcode part2]
  source 1..12: mol_type = other DNA
ttcacatcgtgc

SEQ ID NO: 45442 - DNA, 12 bp, synthetic construct
  misc_feature 1..12: note = synthetic [barcode part2]
  source 1..12: mol_type = other DNA
tggtaacgtatc

SEQ ID NO: 45443 - DNA, 12 bp, synthetic construct
  misc_feature 1..12: note = synthetic [barcode part2]
  source 1..12: mol_type = other DNA
tctgcacacatc

SEQ ID NO: 45444 - DNA, 12 bp, synthetic construct
  misc_feature 1..12: note = synthetic [barcode part2]
  source 1..12: mol_type = other DNA
tgccatattccg

SEQ ID NO: 45445 - DNA, 12 bp, synthetic construct
  misc_feature 1..12: note = synthetic [barcode part2]
  source 1..12: mol_type = other DNA
tggtagtcatac

SEQ ID NO: 45446 - DNA, 12 bp, synthetic construct
  misc_feature 1..12: note = synthetic [barcode part2]
  source 1..12: mol_type = other DNA
agttcggcacgt

SEQ ID NO: 45447 - DNA, 12 bp, synthetic construct
  misc_feature 1..12: note = synthetic [barcode part2]
  source 1..12: mol_type = other DNA
agataaccgacg

SEQ ID NO: 45448 - DNA, 12 bp, synthetic construct
  misc_feature 1..12: note = synthetic [barcode part2]
  source 1..12: mol_type = other DNA
tgagttacacgt

SEQ ID NO: 45449 - DNA, 12 bp, synthetic construct
  misc_feature 1..12: note = synthetic [barcode part2]
  source 1..12: mol_type = other DNA
tataccggattg

SEQ ID NO: 45450 - DNA, 12 bp, synthetic construct
  misc_feature 1..12: note = synthetic [barcode part2]
  source 1..12: mol_type = other DNA
tctctggtcaac

SEQ ID NO: 45451 - DNA, 12 bp, synthetic construct
  misc_feature 1..12: note = synthetic [barcode part2]
  source 1..12: mol_type = other DNA
atgcaattcggt

SEQ ID NO: 45452 - DNA, 12 bp, synthetic construct
  misc_feature 1..12: note = synthetic [barcode part2]
  source 1..12: mol_type = other DNA
tccggaagaagt

SEQ ID NO: 45453 - DNA, 12 bp, synthetic construct
  misc_feature 1..12: note = synthetic [barcode part2]
  source 1..12: mol_type = other DNA
atggtgcggaat

SEQ ID NO: 45454 - DNA, 12 bp, synthetic construct
  misc_feature 1..12: note = synthetic [barcode part2]
  source 1..12: mol_type = other DNA
tatgcgttctcg

SEQ ID NO: 45455 - DNA, 12 bp, synthetic construct
  misc_feature 1..12: note = synthetic [barcode part2]
  source 1..12: mol_type = other DNA
ttcgccacaatc

SEQ ID NO: 45456 - DNA, 12 bp, synthetic construct
  misc_feature 1..12: note = synthetic [barcode part2]
  source 1..12: mol_type = other DNA
tcgccgagtatg

SEQ ID NO: 45457 - DNA, 12 bp, synthetic construct
  misc_feature 1..12: note = synthetic [barcode part2]
  source 1..12: mol_type = other DNA
aatgtcggagac

SEQ ID NO: 45458 - DNA, 12 bp, synthetic construct
  misc_feature 1..12: note = synthetic [barcode part2]
  source 1..12: mol_type = other DNA
tccgaagtctct

SEQ ID NO: 45459 - DNA, 12 bp, synthetic construct
  misc_feature 1..12: note = synthetic [barcode part2]
  source 1..12: mol_type = other DNA
taacggtacatc

SEQ ID NO: 45460 - DNA, 12 bp, synthetic construct
  misc_feature 1..12: note = synthetic [barcode part2]
  source 1..12: mol_type = other DNA
attgtcggtgcg

SEQ ID NO: 45461 - DNA, 12 bp, synthetic construct
  misc_feature 1..12: note = synthetic [barcode part2]
  source 1..12: mol_type = other DNA
ccaccgaatgtg

SEQ ID NO: 45462 - DNA, 12 bp, synthetic construct
  misc_feature 1..12: note = synthetic [barcode part2]
  source 1..12: mol_type = other DNA
tcgcacgagttg

SEQ ID NO: 45463 - DNA, 12 bp, synthetic construct
  misc_feature 1..12: note = synthetic [barcode part2]
  source 1..12: mol_type = other DNA
tggtacaaccgc

SEQ ID NO: 45464 - DNA, 12 bp, synthetic construct
  misc_feature 1..12: note = synthetic [barcode part2]
  source 1..12: mol_type = other DNA
agacgactaacg

SEQ ID NO: 45465 - DNA, 12 bp, synthetic construct
  misc_feature 1..12: note = synthetic [barcode part2]
  source 1..12: mol_type = other DNA
acgtggcgattc

SEQ ID NO: 45466 - DNA, 12 bp, synthetic construct
  misc_feature 1..12: note = synthetic [barcode part2]
  source 1..12: mol_type = other DNA
tccgcactatgt

SEQ ID NO: 45467 - DNA, 12 bp, synthetic construct
  misc_feature 1..12: note = synthetic [barcode part2]
  source 1..12: mol_type = other DNA
cgaaccgcatac

SEQ ID NO: 45468 - DNA, 12 bp, synthetic construct
  misc_feature 1..12: note = synthetic [barcode part2]
  source 1..12: mol_type = other DNA
caacgcagtcgt

SEQ ID NO: 45469 - DNA, 12 bp, synthetic construct
  misc_feature 1..12: note = synthetic [barcode part2]
  source 1..12: mol_type = other DNA
agactaagaccg

SEQ ID NO: 45470 - DNA, 12 bp, synthetic construct
  misc_feature 1..12: note = synthetic [barcode part2]
  source 1..12: mol_type = other DNA
accgcactaacg

SEQ ID NO: 45471 - DNA, 12 bp, synthetic construct
  misc_feature 1..12: note = synthetic [barcode part2]
  source 1..12: mol_type = other DNA
taacacgtagtc

SEQ ID NO: 45472 - DNA, 12 bp, synthetic construct
  misc_feature 1..12: note = synthetic [barcode part2]
  source 1..12: mol_type = other DNA
acaactatcggt

SEQ ID NO: 45473 - DNA, 12 bp, synthetic construct
  misc_feature 1..12: note = synthetic [barcode part2]
  source 1..12: mol_type = other DNA
tgacgtgtaact

SEQ ID NO: 45474 - DNA, 12 bp, synthetic construct
  misc_feature 1..12: note = synthetic [barcode part2]
  source 1..12: mol_type = other DNA
tcttcaactggc

SEQ ID NO: 45475 - DNA, 12 bp, synthetic construct
  misc_feature 1..12: note = synthetic [barcode part2]
  source 1..12: mol_type = other DNA
attgcgtcggtg

SEQ ID NO: 45476 - DNA, 12 bp, synthetic construct
  misc_feature 1..12: note = synthetic [barcode part2]
  source 1..12: mol_type = other DNA
cggcgactgtat

SEQ ID NO: 45477 - DNA, 12 bp, synthetic construct
  misc_feature 1..12: note = synthetic [barcode part2]
  source 1..12: mol_type = other DNA
taacggttgcgc

SEQ ID NO: 45478 - DNA, 12 bp, synthetic construct
  misc_feature 1..12: note = synthetic [barcode part2]
  source 1..12: mol_type = other DNA
tatccagtggcg

SEQ ID NO: 45479 - DNA, 12 bp, synthetic construct
  misc_feature 1..12: note = synthetic [barcode part2]
  source 1..12: mol_type = other DNA
atgcaatggtct

SEQ ID NO: 45480 - DNA, 12 bp, synthetic construct
  misc_feature 1..12: note = synthetic [barcode part2]
  source 1..12: mol_type = other DNA
accgttaacatg

SEQ ID NO: 45481 - DNA, 12 bp, synthetic construct
  misc_feature 1..12: note = synthetic [barcode part2]
  source 1..12: mol_type = other DNA
tatcttcgcacg

SEQ ID NO: 45482 - DNA, 12 bp, synthetic construct
  misc_feature 1..12: note = synthetic [barcode part2]
  source 1..12: mol_type = other DNA
aatcgacggaac

SEQ ID NO: 45483 - DNA, 12 bp, synthetic construct
  misc_feature 1..12: note = synthetic [barcode part2]
  source 1..12: mol_type = other DNA
ccacacgaatcg

SEQ ID NO: 45484 - DNA, 12 bp, synthetic construct
  misc_feature 1..12: note = synthetic [barcode part2]
  source 1..12: mol_type = other DNA
acgaactatcac

SEQ ID NO: 45485 - DNA, 12 bp, synthetic construct
  misc_feature 1..12: note = synthetic [barcode part2]
  source 1..12: mol_type = other DNA
ttctgcgtacac

SEQ ID NO: 45486 - DNA, 12 bp, synthetic construct
  misc_feature 1..12: note = synthetic [barcode part2]
  source 1..12: mol_type = other DNA
tagaccgtgcgt

SEQ ID NO: 45487 - DNA, 12 bp, synthetic construct
  misc_feature 1..12: note = synthetic [barcode part2]
  source 1..12: mol_type = other DNA
acaccagtaact

SEQ ID NO: 45488 - DNA, 12 bp, synthetic construct
  misc_feature 1..12: note = synthetic [barcode part2]
  source 1..12: mol_type = other DNA
tcgaatcgcacg

SEQ ID NO: 45489 - DNA, 12 bp, synthetic construct
  misc_feature 1..12: note = synthetic [barcode part2]
  source 1..12: mol_type = other DNA
cgacacgtgatc

SEQ ID NO: 45490 - DNA, 12 bp, synthetic construct
  misc_feature 1..12: note = synthetic [barcode part2]
  source 1..12: mol_type = other DNA
tatcgtgtctcg

SEQ ID NO: 45491 - DNA, 12 bp, synthetic construct
  misc_feature 1..12: note = synthetic [barcode part2]
  source 1..12: mol_type = other DNA
agtcggtagagt

SEQ ID NO: 45492 - DNA, 12 bp, synthetic construct
  misc_feature 1..12: note = synthetic [barcode part2]
  source 1..12: mol_type = other DNA
attccagtctcg

SEQ ID NO: 45493 - DNA, 12 bp, synthetic construct
  misc_feature 1..12: note = synthetic [barcode part2]
  source 1..12: mol_type = other DNA
tatggtccgacg

SEQ ID NO: 45494 - DNA, 12 bp, synthetic construct
  misc_feature 1..12: note = synthetic [barcode part2]
  source 1..12: mol_type = other DNA
tcttaacgtcgc

SEQ ID NO: 45495 - DNA, 12 bp, synthetic construct
  misc_feature 1..12: note = synthetic [barcode part2]
  source 1..12: mol_type = other DNA
tggtgatatgtc

SEQ ID NO: 45496 - DNA, 12 bp, synthetic construct
  misc_feature 1..12: note = synthetic [barcode part2]
  source 1..12: mol_type = other DNA
agtccgaatact

SEQ ID NO: 45497 - DNA, 12 bp, synthetic construct
  misc_feature 1..12: note = synthetic [barcode part2]
  source 1..12: mol_type = other DNA
attctggttccg

SEQ ID NO: 45498 - DNA, 12 bp, synthetic construct
  misc_feature 1..12: note = synthetic [barcode part2]
  source 1..12: mol_type = other DNA
agtgattcgcat

SEQ ID NO: 45499 - DNA, 12 bp, synthetic construct
  misc_feature 1..12: note = synthetic [barcode part2]
  source 1..12: mol_type = other DNA
tggtacagttac

SEQ ID NO: 45500 - DNA, 12 bp, synthetic construct
  misc_feature 1..12: note = synthetic [barcode part2]
  source 1..12: mol_type = other DNA
tgagtataccgt

SEQ ID NO: 45501 - DNA, 12 bp, synthetic construct
  misc_feature 1..12: note = synthetic [barcode part2]
  source 1..12: mol_type = other DNA
cgatggcacatc

SEQ ID NO: 45502 - DNA, 12 bp, synthetic construct
  misc_feature 1..12: note = synthetic [barcode part2]
  source 1..12: mol_type = other DNA
cgatgcgcaatc

SEQ ID NO: 45503 - DNA, 12 bp, synthetic construct
  misc_feature 1..12: note = synthetic [barcode part2]
  source 1..12: mol_type = other DNA
ttccacgatgtc

SEQ ID NO: 45504 - DNA, 12 bp, synthetic construct
  misc_feature 1..12: note = synthetic [barcode part2]
  source 1..12: mol_type = other DNA
ttctctcggaac

SEQ ID NO: 45505 - DNA, 12 bp, synthetic construct
  misc_feature 1..12: note = synthetic [barcode part2]
  source 1..12: mol_type = other DNA
cgacgtgatcac

SEQ ID NO: 45506 - DNA, 12 bp, synthetic construct
  misc_feature 1..12: note = synthetic [barcode part2]
  source 1..12: mol_type = other DNA
acgatcactaac

SEQ ID NO: 45507 - DNA, 12 bp, synthetic construct
  misc_feature 1..12: note = synthetic [barcode part2]
  source 1..12: mol_type = other DNA
cagataccggtc

SEQ ID NO: 45508 - DNA, 12 bp, synthetic construct
  misc_feature 1..12: note = synthetic [barcode part2]
  source 1..12: mol_type = other DNA
tgaccgacttct

SEQ ID NO: 45509 - DNA, 12 bp, synthetic construct
  misc_feature 1..12: note = synthetic [barcode part2]
  source 1..12: mol_type = other DNA
aatccgaacatc

SEQ ID NO: 45510 - DNA, 12 bp, synthetic construct
  misc_feature 1..12: note = synthetic [barcode part2]
  source 1..12: mol_type = other DNA
aagaatcgaccg

SEQ ID NO: 45511 - DNA, 12 bp, synthetic construct
  misc_feature 1..12: note = synthetic [barcode part2]
  source 1..12: mol_type = other DNA
cgattccaactc

SEQ ID NO: 45512 - DNA, 12 bp, synthetic construct
  misc_feature 1..12: note = synthetic [barcode part2]
  source 1..12: mol_type = other DNA
aatatgttcggc

SEQ ID NO: 45513 - DNA, 12 bp, synthetic construct
  misc_feature 1..12: note = synthetic [barcode part2]
  source 1..12: mol_type = other DNA
acgccgaactac

SEQ ID NO: 45514 - DNA, 12 bp, synthetic construct
  misc_feature 1..12: note = synthetic [barcode part2]
  source 1..12: mol_type = other DNA
tctaccgatcac

SEQ ID NO: 45515 - DNA, 12 bp, synthetic construct
  misc_feature 1..12: note = synthetic [barcode part2]
  source 1..12: mol_type = other DNA
caacgtggttat

SEQ ID NO: 45516 - DNA, 12 bp, synthetic construct
  misc_feature 1..12: note = synthetic [barcode part2]
  source 1..12: mol_type = other DNA
accgtattgatg

SEQ ID NO: 45517 - DNA, 12 bp, synthetic construct
  misc_feature 1..12: note = synthetic [barcode part2]
  source 1..12: mol_type = other DNA
accgtcggtatg

SEQ ID NO: 45518 - DNA, 12 bp, synthetic construct
  misc_feature 1..12: note = synthetic [barcode part2]
  source 1..12: mol_type = other DNA
caccgacgattg

SEQ ID NO: 45519 - DNA, 12 bp, synthetic construct
  misc_feature 1..12: note = synthetic [barcode part2]
  source 1..12: mol_type = other DNA
accatgttaacg

SEQ ID NO: 45520 - DNA, 12 bp, synthetic construct
  misc_feature 1..12: note = synthetic [barcode part2]
  source 1..12: mol_type = other DNA
aagtagtcgacg

SEQ ID NO: 45521 - DNA, 12 bp, synthetic construct
  misc_feature 1..12: note = synthetic [barcode part2]
  source 1..12: mol_type = other DNA
cggtgatatact

SEQ ID NO: 45522 - DNA, 12 bp, synthetic construct
  misc_feature 1..12: note = synthetic [barcode part2]
  source 1..12: mol_type = other DNA
ttcatcagtcgc

SEQ ID NO: 45523 - DNA, 12 bp, synthetic construct
  misc_feature 1..12: note = synthetic [barcode part2]
  source 1..12: mol_type = other DNA
tagataccgact

SEQ ID NO: 45524 - DNA, 12 bp, synthetic construct
  misc_feature 1..12: note = synthetic [barcode part2]
  source 1..12: mol_type = other DNA
accgcgttagtg

SEQ ID NO: 45525 - DNA, 12 bp, synthetic construct
  misc_feature 1..12: note = synthetic [barcode part2]
  source 1..12: mol_type = other DNA
atagaccaccgc

SEQ ID NO: 45526 - DNA, 12 bp, synthetic construct
  misc_feature 1..12: note = synthetic [barcode part2]
  source 1..12: mol_type = other DNA
cacacattctcg

SEQ ID NO: 45527 - DNA, 12 bp, synthetic construct
  misc_feature 1..12: note = synthetic [barcode part2]
  source 1..12: mol_type = other DNA
atgtcggaccgt

SEQ ID NO: 45528 - DNA, 12 bp, synthetic construct
  misc_feature 1..12: note = synthetic [barcode part2]
  source 1..12: mol_type = other DNA
tgcaccgagttg

SEQ ID NO: 45529 - DNA, 12 bp, synthetic construct
  misc_feature 1..12: note = synthetic [barcode part2]
  source 1..12: mol_type = other DNA
caacggttgtat

SEQ ID NO: 45530 - DNA, 12 bp, synthetic construct
  misc_feature 1..12: note = synthetic [barcode part2]
  source 1..12: mol_type = other DNA
tccatgtgcact

SEQ ID NO: 45531 - DNA, 12 bp, synthetic construct
  misc_feature 1..12: note = synthetic [barcode part2]
  source 1..12: mol_type = other DNA
atgactactggt

SEQ ID NO: 45532 - DNA, 12 bp, synthetic construct
  misc_feature 1..12: note = synthetic [barcode part2]
  source 1..12: mol_type = other DNA
ttctcggtcaac

SEQ ID NO: 45533 - DNA, 12 bp, synthetic construct
  misc_feature 1..12: note = synthetic [barcode part2]
  source 1..12: mol_type = other DNA
agtcgacgaagt

SEQ ID NO: 45534 - DNA, 12 bp, synthetic construct
  misc_feature 1..12: note = synthetic [barcode part2]
  source 1..12: mol_type = other DNA
cgtagttcgacg

SEQ ID NO: 45535 - DNA, 12 bp, synthetic construct
  misc_feature 1..12: note = synthetic [barcode part2]
  source 1..12: mol_type = other DNA
tgaacatgtcgt

SEQ ID NO: 45536 - DNA, 12 bp, synthetic construct
  misc_feature 1..12: note = synthetic [barcode part2]
  source 1..12: mol_type = other DNA
cgttcggtgatg

SEQ ID NO: 45537 - DNA, 12 bp, synthetic construct
  misc_feature 1..12: note = synthetic [barcode part2]
  source 1..12: mol_type = other DNA
tgcgtcggattg

SEQ ID NO: 45538 - DNA, 12 bp, synthetic construct
  misc_feature 1..12: note = synthetic [barcode part2]
  source 1..12: mol_type = other DNA
taacgtggtcgc

SEQ ID NO: 45539 - DNA, 12 bp, synthetic construct
  misc_feature 1..12: note = synthetic [barcode part2]
  source 1..12: mol_type = other DNA
tgcaactcggtg

SEQ ID NO: 45540 - DNA, 12 bp, synthetic construct
  misc_feature 1..12: note = synthetic [barcode part2]
  source 1..12: mol_type = other DNA
aattgcgagttc

SEQ ID NO: 45541 - DNA, 12 bp, synthetic construct
  misc_feature 1..12: note = synthetic [barcode part2]
  source 1..12: mol_type = other DNA
tgacatagtcgt

SEQ ID NO: 45542 - DNA, 12 bp, synthetic construct
  misc_feature 1..12: note = synthetic [barcode part2]
  source 1..12: mol_type = other DNA
tgacggtatact

SEQ ID NO: 45543 - DNA, 12 bp, synthetic construct
  misc_feature 1..12: note = synthetic [barcode part2]
  source 1..12: mol_type = other DNA
tgagaagtcggt

SEQ ID NO: 45544 - DNA, 12 bp, synthetic construct
  misc_feature 1..12: note = synthetic [barcode part2]
  source 1..12: mol_type = other DNA
atacgactcaac

SEQ ID NO: 45545 - DNA, 12 bp, synthetic construct
  misc_feature 1..12: note = synthetic [barcode part2]
  source 1..12: mol_type = other DNA
ccaactatctcg

SEQ ID NO: 45546 - DNA, 12 bp, synthetic construct
  misc_feature 1..12: note = synthetic [barcode part2]
  source 1..12: mol_type = other DNA
tgaattgcgtgt

SEQ ID NO: 45547 - DNA, 12 bp, synthetic construct
  misc_feature 1..12: note = synthetic [barcode part2]
  source 1..12: mol_type = other DNA
cggttgagaagt

SEQ ID NO: 45548 - DNA, 12 bp, synthetic construct
  misc_feature 1..12: note = synthetic [barcode part2]
  source 1..12: mol_type = other DNA
cgatatgattgc

SEQ ID NO: 45549 - DNA, 12 bp, synthetic construct
  misc_feature 1..12: note = synthetic [barcode part2]
  source 1..12: mol_type = other DNA
tgacgaccgcat

SEQ ID NO: 45550 - DNA, 12 bp, synthetic construct
  misc_feature 1..12: note = synthetic [barcode part2]
  source 1..12: mol_type = other DNA
taatagtcacgc

SEQ ID NO: 45551 - DNA, 12 bp, synthetic construct
  misc_feature 1..12: note = synthetic [barcode part2]
  source 1..12: mol_type = other DNA
tggatcatgcgc

SEQ ID NO: 45552 - DNA, 12 bp, synthetic construct
  misc_feature 1..12: note = synthetic [barcode part2]
  source 1..12: mol_type = other DNA
tatcggtaatcg

SEQ ID NO: 45553 - DNA, 12 bp, synthetic construct
  misc_feature 1..12: note = synthetic [barcode part2]
  source 1..12: mol_type = other DNA
atgttgacgact

SEQ ID NO: 45554 - DNA, 12 bp, synthetic construct
  misc_feature 1..12: note = synthetic [barcode part2]
  source 1..12: mol_type = other DNA
tcttatgtgcgc

SEQ ID NO: 45555 - DNA, 12 bp, synthetic construct
  misc_feature 1..12: note = synthetic [barcode part2]
  source 1..12: mol_type = other DNA
ttccacgtatgc

SEQ ID NO: 45556 - DNA, 12 bp, synthetic construct
  misc_feature 1..12: note = synthetic [barcode part2]
  source 1..12: mol_type = other DNA
cgaattgcgcac

SEQ ID NO: 45557 - DNA, 12 bp, synthetic construct
  misc_feature 1..12: note = synthetic [barcode part2]
  source 1..12: mol_type = other DNA
agtgtatggtct

SEQ ID NO: 45558 - DNA, 12 bp, synthetic construct
  misc_feature 1..12: note = synthetic [barcode part2]
  source 1..12: mol_type = other DNA
tctcacgtacac

SEQ ID NO: 45559 - DNA, 12 bp, synthetic construct
  misc_feature 1..12: note = synthetic [barcode part2]
  source 1..12: mol_type = other DNA
tcgttgaacatg

SEQ ID NO: 45560 - DNA, 12 bp, synthetic construct
  misc_feature 1..12: note = synthetic [barcode part2]
  source 1..12: mol_type = other DNA
cgacttcgattc

SEQ ID NO: 45561 - DNA, 12 bp, synthetic construct
  misc_feature 1..12: note = synthetic [barcode part2]
  source 1..12: mol_type = other DNA
tgacacgaccgt

SEQ ID NO: 45562 - DNA, 12 bp, synthetic construct
  misc_feature 1..12: note = synthetic [barcode part2]
  source 1..12: mol_type = other DNA
agtcgtgttagt

SEQ ID NO: 45563 - DNA, 12 bp, synthetic construct
  misc_feature 1..12: note = synthetic [barcode part2]
  source 1..12: mol_type = other DNA
ttcgagagagac

SEQ ID NO: 45564 - DNA, 12 bp, synthetic construct
  misc_feature 1..12: note = synthetic [barcode part2]
  source 1..12: mol_type = other DNA
aaccgacagagt

SEQ ID NO: 45565 - DNA, 12 bp, synthetic construct
  misc_feature 1..12: note = synthetic [barcode part2]
  source 1..12: mol_type = other DNA
cgagtattgatc

SEQ ID NO: 45566 - DNA, 12 bp, synthetic construct
  misc_feature 1..12: note = synthetic [barcode part2]
  source 1..12: mol_type = other DNA
agagagacttcg

SEQ ID NO: 45567 - DNA, 12 bp, synthetic construct
  misc_feature 1..12: note = synthetic [barcode part2]
  source 1..12: mol_type = other DNA
aacgagacgact

SEQ ID NO: 45568 - DNA, 12 bp, synthetic construct
  misc_feature 1..12: note = synthetic [barcode part2]
  source 1..12: mol_type = other DNA
tggtagttgcgc

SEQ ID NO: 45569 - DNA, 12 bp, synthetic construct
  misc_feature 1..12: note = synthetic [barcode part2]
  source 1..12: mol_type = other DNA
ttacgactctcg

SEQ ID NO: 45570 - DNA, 12 bp, synthetic construct
  misc_feature 1..12: note = synthetic [barcode part2]
  source 1..12: mol_type = other DNA
tctgaccagttc

SEQ ID NO: 45571 - DNA, 12 bp, synthetic construct
  misc_feature 1..12: note = synthetic [barcode part2]
  source 1..12: mol_type = other DNA
caatatggtcgt

SEQ ID NO: 45572 - DNA, 12 bp, synthetic construct
  misc_feature 1..12: note = synthetic [barcode part2]
  source 1..12: mol_type = other DNA
ccatcggacatg

SEQ ID NO: 45573 - DNA, 12 bp, synthetic construct
  misc_feature 1..12: note = synthetic [barcode part2]
  source 1..12: mol_type = other DNA
agtcgcattgat

SEQ ID NO: 45574 - DNA, 12 bp, synthetic construct
  misc_feature 1..12: note = synthetic [barcode part2]
  source 1..12: mol_type = other DNA
taatggcatgtc

SEQ ID NO: 45575 - DNA, 12 bp, synthetic construct
  misc_feature 1..12: note = synthetic [barcode part2]
  source 1..12: mol_type = other DNA
tggtaactgtac

SEQ ID NO: 45576 - DNA, 12 bp, synthetic construct
  misc_feature 1..12: note = synthetic [barcode part2]
  source 1..12: mol_type = other DNA
aattatgtcggc

SEQ ID NO: 45577 - DNA, 12 bp, synthetic construct
  misc_feature 1..12: note = synthetic [barcode part2]
  source 1..12: mol_type = other DNA
aatcttcgccac

SEQ ID NO: 45578 - DNA, 12 bp, synthetic construct
  misc_feature 1..12: note = synthetic [barcode part2]
  source 1..12: mol_type = other DNA
tatctctgcgtg

SEQ ID NO: 45579 - DNA, 12 bp, synthetic construct
  misc_feature 1..12: note = synthetic [barcode part2]
  source 1..12: mol_type = other DNA
agatagtcggtg

SEQ ID NO: 45580 - DNA, 12 bp, synthetic construct
  misc_feature 1..12: note = synthetic [barcode part2]
  source 1..12: mol_type = other DNA
agaaccgtgatg

SEQ ID NO: 45581 - DNA, 12 bp, synthetic construct
  misc_feature 1..12: note = synthetic [barcode part2]
  source 1..12: mol_type = other DNA
tggataccaatc

SEQ ID NO: 45582 - DNA, 12 bp, synthetic construct
  misc_feature 1..12: note = synthetic [barcode part2]
  source 1..12: mol_type = other DNA
aagtcaagaccg

SEQ ID NO: 45583 - DNA, 12 bp, synthetic construct
  misc_feature 1..12: note = synthetic [barcode part2]
  source 1..12: mol_type = other DNA
tctgtatgcgtc

SEQ ID NO: 45584 - DNA, 12 bp, synthetic construct
  misc_feature 1..12: note = synthetic [barcode part2]
  source 1..12: mol_type = other DNA
tggacgcattgc

SEQ ID NO: 45585 - DNA, 12 bp, synthetic construct
  misc_feature 1..12: note = synthetic [barcode part2]
  source 1..12: mol_type = other DNA
tgcagagacatg

SEQ ID NO: 45586 - DNA, 12 bp, synthetic construct
  misc_feature 1..12: note = synthetic [barcode part2]
  source 1..12: mol_type = other DNA
cgatctcagttc

SEQ ID NO: 45587 - DNA, 12 bp, synthetic construct
  misc_feature 1..12: note = synthetic [barcode part2]
  source 1..12: mol_type = other DNA
accgtgccaatg

SEQ ID NO: 45588 - DNA, 12 bp, synthetic construct
  misc_feature 1..12: note = synthetic [barcode part2]
  source 1..12: mol_type = other DNA
tagtaaccgcat

SEQ ID NO: 45589 - DNA, 12 bp, synthetic construct
  misc_feature 1..12: note = synthetic [barcode part2]
  source 1..12: mol_type = other DNA
tctctaatcggc

SEQ ID NO: 45590 - DNA, 12 bp, synthetic construct
  misc_feature 1..12: note = synthetic [barcode part2]
  source 1..12: mol_type = other DNA
tcggattacatg

SEQ ID NO: 45591 - DNA, 12 bp, synthetic construct
  misc_feature 1..12: note = synthetic [barcode part2]
  source 1..12: mol_type = other DNA
tggttccgattc

SEQ ID NO: 45592 - DNA, 12 bp, synthetic construct
  misc_feature 1..12: note = synthetic [barcode part2]
  source 1..12: mol_type = other DNA
ttacacggattg

SEQ ID NO: 45593 - DNA, 12 bp, synthetic construct
  misc_feature 1..12: note = synthetic [barcode part2]
  source 1..12: mol_type = other DNA
agtgtattcggt

SEQ ID NO: 45594 - DNA, 12 bp, synthetic construct
  misc_feature 1..12: note = synthetic [barcode part2]
  source 1..12: mol_type = other DNA
tctcgtggtatc

SEQ ID NO: 45595 - DNA, 12 bp, synthetic construct
  misc_feature 1..12: note = synthetic [barcode part2]
  source 1..12: mol_type = other DNA
taaccgagagac

SEQ ID NO: 45596 - DNA, 12 bp, synthetic construct
  misc_feature 1..12: note = synthetic [barcode part2]
  source 1..12: mol_type = other DNA
tctatgttgcgc

SEQ ID NO: 45597 - DNA, 12 bp, synthetic construct
  misc_feature 1..12: note = synthetic [barcode part2]
  source 1..12: mol_type = other DNA
tcttcggaactc

SEQ ID NO: 45598 - DNA, 12 bp, synthetic construct
  misc_feature 1..12: note = synthetic [barcode part2]
  source 1..12: mol_type = other DNA
aactcggtgcgt

SEQ ID NO: 45599 - DNA, 12 bp, synthetic construct
  misc_feature 1..12: note = synthetic [barcode part2]
  source 1..12: mol_type = other DNA
atggaccgccat

SEQ ID NO: 45600 - DNA, 12 bp, synthetic construct
  misc_feature 1..12: note = synthetic [barcode part2]
  source 1..12: mol_type = other DNA
ttcttgaccgac

SEQ ID NO: 45601 - DNA, 12 bp, synthetic construct
  misc_feature 1..12: note = synthetic [barcode part2]
  source 1..12: mol_type = other DNA
cggtacagtcgt

SEQ ID NO: 45602 - DNA, 12 bp, synthetic construct
  misc_feature 1..12: note = synthetic [barcode part2]
  source 1..12: mol_type = other DNA
tagtacacgact

SEQ ID NO: 45603 - DNA, 12 bp, synthetic construct
  misc_feature 1..12: note = synthetic [barcode part2]
  source 1..12: mol_type = other DNA
tggcgtgcaatc

SEQ ID NO: 45604 - DNA, 12 bp, synthetic construct
  misc_feature 1..12: note = synthetic [barcode part2]
  source 1..12: mol_type = other DNA
aaccgtgttgat

SEQ ID NO: 45605 - DNA, 12 bp, synthetic construct
  misc_feature 1..12: note = synthetic [barcode part2]
  source 1..12: mol_type = other DNA
taatacagtcgc

SEQ ID NO: 45606 - DNA, 12 bp, synthetic construct
  misc_feature 1..12: note = synthetic [barcode part2]
  source 1..12: mol_type = other DNA
acgatcatcggc

SEQ ID NO: 45607 - DNA, 12 bp, synthetic construct
  misc_feature 1..12: note = synthetic [barcode part2]
  source 1..12: mol_type = other DNA
tataatccggtg

SEQ ID NO: 45608 - DNA, 12 bp, synthetic construct
  misc_feature 1..12: note = synthetic [barcode part2]
  source 1..12: mol_type = other DNA
tgcattgaactg

SEQ ID NO: 45609 - DNA, 12 bp, synthetic construct
  misc_feature 1..12: note = synthetic [barcode part2]
  source 1..12: mol_type = other DNA
accacatcaatg

SEQ ID NO: 45610 - DNA, 12 bp, synthetic construct
  misc_feature 1..12: note = synthetic [barcode part2]
  source 1..12: mol_type = other DNA
tctgcgtgtatc

SEQ ID NO: 45611 - DNA, 12 bp, synthetic construct
  misc_feature 1..12: note = synthetic [barcode part2]
  source 1..12: mol_type = other DNA
agaccagaatcg

SEQ ID NO: 45612 - DNA, 12 bp, synthetic construct
  misc_feature 1..12: note = synthetic [barcode part2]
  source 1..12: mol_type = other DNA
cactgataatcg

SEQ ID NO: 45613 - DNA, 12 bp, synthetic construct
  misc_feature 1..12: note = synthetic [barcode part2]
  source 1..12: mol_type = other DNA
acggtcgagttc

SEQ ID NO: 45614 - DNA, 12 bp, synthetic construct
  misc_feature 1..12: note = synthetic [barcode part2]
  source 1..12: mol_type = other DNA
atggccaccgat

SEQ ID NO: 45615 - DNA, 12 bp, synthetic construct
  misc_feature 1..12: note = synthetic [barcode part2]
  source 1..12: mol_type = other DNA
taatgcgattgc

SEQ ID NO: 45616 - DNA, 12 bp, synthetic construct
  misc_feature 1..12: note = synthetic [barcode part2]
  source 1..12: mol_type = other DNA
tatctggcggtg

SEQ ID NO: 45617 - DNA, 12 bp, synthetic construct
  misc_feature 1..12: note = synthetic [barcode part2]
  source 1..12: mol_type = other DNA
tgatagtgcact

SEQ ID NO: 45618 - DNA, 12 bp, synthetic construct
  misc_feature 1..12: note = synthetic [barcode part2]
  source 1..12: mol_type = other DNA
tctcgcacatac

SEQ ID NO: 45619 - DNA, 12 bp, synthetic construct
  misc_feature 1..12: note = synthetic [barcode part2]
  source 1..12: mol_type = other DNA
acgagttactac

SEQ ID NO: 45620 - DNA, 12 bp, synthetic construct
  misc_feature 1..12: note = synthetic [barcode part2]
  source 1..12: mol_type = other DNA
ttcacatgcgtc

SEQ ID NO: 45621 - DNA, 12 bp, synthetic construct
  misc_feature 1..12: note = synthetic [barcode part2]
  source 1..12: mol_type = other DNA
tcgtaactctcg

SEQ ID NO: 45622 - DNA, 12 bp, synthetic construct
  misc_feature 1..12: note = synthetic [barcode part2]
  source 1..12: mol_type = other DNA
ttcgtatcgcac

SEQ ID NO: 45623 - DNA, 12 bp, synthetic construct
  misc_feature 1..12: note = synthetic [barcode part2]
  source 1..12: mol_type = other DNA
atggattcgact

SEQ ID NO: 45624 - DNA, 12 bp, synthetic construct
  misc_feature 1..12: note = synthetic [barcode part2]
  source 1..12: mol_type = other DNA
tcttgtacgtgc

SEQ ID NO: 45625 - DNA, 12 bp, synthetic construct
  misc_feature 1..12: note = synthetic [barcode part2]
  source 1..12: mol_type = other DNA
cgatacaatcac

SEQ ID NO: 45626 - DNA, 12 bp, synthetic construct
  misc_feature 1..12: note = synthetic [barcode part2]
  source 1..12: mol_type = other DNA
ttcaccgattgc

SEQ ID NO: 45627 - DNA, 12 bp, synthetic construct
  misc_feature 1..12: note = synthetic [barcode part2]
  source 1..12: mol_type = other DNA
tgatatgcgact

SEQ ID NO: 45628 - DNA, 12 bp, synthetic construct
  misc_feature 1..12: note = synthetic [barcode part2]
  source 1..12: mol_type = other DNA
aatcttccggtc

SEQ ID NO: 45629 - DNA, 12 bp, synthetic construct
  misc_feature 1..12: note = synthetic [barcode part2]
  source 1..12: mol_type = other DNA
cggtgcgtaact

SEQ ID NO: 45630 - DNA, 12 bp, synthetic construct
  misc_feature 1..12: note = synthetic [barcode part2]
  source 1..12: mol_type = other DNA
cacgagaatgtg

SEQ ID NO: 45631 - DNA, 12 bp, synthetic construct
  misc_feature 1..12: note = synthetic [barcode part2]
  source 1..12: mol_type = other DNA
aaccacgaatct

SEQ ID NO: 45632 - DNA, 12 bp, synthetic construct
  misc_feature 1..12: note = synthetic [barcode part2]
  source 1..12: mol_type = other DNA
attaccgacgcg

SEQ ID NO: 45633 - DNA, 12 bp, synthetic construct
  misc_feature 1..12: note = synthetic [barcode part2]
  source 1..12: mol_type = other DNA
ttcgaccgattc

SEQ ID NO: 45634 - DNA, 12 bp, synthetic construct
  misc_feature 1..12: note = synthetic [barcode part2]
  source 1..12: mol_type = other DNA
cgatgatcacgc

SEQ ID NO: 45635 - DNA, 12 bp, synthetic construct
  misc_feature 1..12: note = synthetic [barcode part2]
  source 1..12: mol_type = other DNA
agttgtatcggt

SEQ ID NO: 45636 - DNA, 12 bp, synthetic construct
  misc_feature 1..12: note = synthetic [barcode part2]
  source 1..12: mol_type = other DNA
tgacggttacat

SEQ ID NO: 45637 - DNA, 12 bp, synthetic construct
  misc_feature 1..12: note = synthetic [barcode part2]
  source 1..12: mol_type = other DNA
attcgtgtaacg

SEQ ID NO: 45638 - DNA, 12 bp, synthetic construct
  misc_feature 1..12: note = synthetic [barcode part2]
  source 1..12: mol_type = other DNA
cggtagtcacgt

SEQ ID NO: 45639 - DNA, 12 bp, synthetic construct
  misc_feature 1..12: note = synthetic [barcode part2]
  source 1..12: mol_type = other DNA
cgaaccgacatc

SEQ ID NO: 45640 - DNA, 12 bp, synthetic construct
  misc_feature 1..12: note = synthetic [barcode part2]
  source 1..12: mol_type = other DNA
tgacgtgattgt

SEQ ID NO: 45641 - DNA, 12 bp, synthetic construct
  misc_feature 1..12: note = synthetic [barcode part2]
  source 1..12: mol_type = other DNA
acgaacttagtc

SEQ ID NO: 45642 - DNA, 12 bp, synthetic construct
  misc_feature 1..12: note = synthetic [barcode part2]
  source 1..12: mol_type = other DNA
tagactacacgt

SEQ ID NO: 45643 - DNA, 12 bp, synthetic construct
  misc_feature 1..12: note = synthetic [barcode part2]
  source 1..12: mol_type = other DNA
tatgtcgagttg

SEQ ID NO: 45644 - DNA, 12 bp, synthetic construct
  misc_feature 1..12: note = synthetic [barcode part2]
  source 1..12: mol_type = other DNA
ataagttaccgc

SEQ ID NO: 45645 - DNA, 12 bp, synthetic construct
  misc_feature 1..12: note = synthetic [barcode part2]
  source 1..12: mol_type = other DNA
cagtgcgactac

SEQ ID NO: 45646 - DNA, 12 bp, synthetic construct
  misc_feature 1..12: note = synthetic [barcode part2]
  source 1..12: mol_type = other DNA
ttatgcggaccg

SEQ ID NO: 45647 - DNA, 12 bp, synthetic construct
  misc_feature 1..12: note = synthetic [barcode part2]
  source 1..12: mol_type = other DNA
atagattgtcgc

SEQ ID NO: 45648 - DNA, 12 bp, synthetic construct
  misc_feature 1..12: note = synthetic [barcode part2]
  source 1..12: mol_type = other DNA
acgttgaaccgc

SEQ ID NO: 45649 - DNA, 12 bp, synthetic construct
  misc_feature 1..12: note = synthetic [barcode part2]
  source 1..12: mol_type = other DNA
acgtcaacggtc

SEQ ID NO: 45650 - DNA, 12 bp, synthetic construct
  misc_feature 1..12: note = synthetic [barcode part2]
  source 1..12: mol_type = other DNA
ccatgcgaactg

SEQ ID NO: 45651 - DNA, 12 bp, synthetic construct
  misc_feature 1..12: note = synthetic [barcode part2]
  source 1..12: mol_type = other DNA
ttcgttacggtc

SEQ ID NO: 45652 - DNA, 12 bp, synthetic construct
  misc_feature 1..12: note = synthetic [barcode part2]
  source 1..12: mol_type = other DNA
ttagaccacatg

SEQ ID NO: 45653 - DNA, 12 bp, synthetic construct
  misc_feature 1..12: note = synthetic [barcode part2]
  source 1..12: mol_type = other DNA
cgacatagttac

SEQ ID NO: 45654 - DNA, 12 bp, synthetic construct
  misc_feature 1..12: note = synthetic [barcode part2]
  source 1..12: mol_type = other DNA
ttactctcgacg

SEQ ID NO: 45655 - DNA, 12 bp, synthetic construct
  misc_feature 1..12: note = synthetic [barcode part2]
  source 1..12: mol_type = other DNA
tcgccagacatg

SEQ ID NO: 45656 - DNA, 12 bp, synthetic construct
  misc_feature 1..12: note = synthetic [barcode part2]
  source 1..12: mol_type = other DNA
tccgtatcacgt

SEQ ID NO: 45657 - DNA, 12 bp, synthetic construct
  misc_feature 1..12: note = synthetic [barcode part2]
  source 1..12: mol_type = other DNA
cgtcaataatcg

SEQ ID NO: 45658 - DNA, 12 bp, synthetic construct
  misc_feature 1..12: note = synthetic [barcode part2]
  source 1..12: mol_type = other DNA
tctcggtactac

SEQ ID NO: 45659 - DNA, 12 bp, synthetic construct
  misc_feature 1..12: note = synthetic [barcode part2]
  source 1..12: mol_type = other DNA
caagtcgcgcat

SEQ ID NO: 45660 - DNA, 12 bp, synthetic construct
  misc_feature 1..12: note = synthetic [barcode part2]
  source 1..12: mol_type = other DNA
tctaccgtagtc

SEQ ID NO: 45661 - DNA, 12 bp, synthetic construct
  misc_feature 1..12: note = synthetic [barcode part2]
  source 1..12: mol_type = other DNA
cgagtcggtatc

SEQ ID NO: 45662 - DNA, 12 bp, synthetic construct
  misc_feature 1..12: note = synthetic [barcode part2]
  source 1..12: mol_type = other DNA
atagttaccgac

SEQ ID NO: 45663 - DNA, 12 bp, synthetic construct
  misc_feature 1..12: note = synthetic [barcode part2]
  source 1..12: mol_type = other DNA
agaatcacggtg

SEQ ID NO: 45664 - DNA, 12 bp, synthetic construct
  misc_feature 1..12: note = synthetic [barcode part2]
  source 1..12: mol_type = other DNA
atacggtaactc

SEQ ID NO: 45665 - DNA, 12 bp, synthetic construct
  misc_feature 1..12: note = synthetic [barcode part2]
  source 1..12: mol_type = other DNA
cgaactacacgc

SEQ ID NO: 45666 - DNA, 12 bp, synthetic construct
  misc_feature 1..12: note = synthetic [barcode part2]
  source 1..12: mol_type = other DNA
ccagtataatcg

SEQ ID NO: 45667 - DNA, 12 bp, synthetic construct
  misc_feature 1..12: note = synthetic [barcode part2]
  source 1..12: mol_type = other DNA
atgccgaattgt

SEQ ID NO: 45668 - DNA, 12 bp, synthetic construct
  misc_feature 1..12: note = synthetic [barcode part2]
  source 1..12: mol_type = other DNA
tcgttgagtgcg

SEQ ID NO: 45669 - DNA, 12 bp, synthetic construct
  misc_feature 1..12: note = synthetic [barcode part2]
  source 1..12: mol_type = other DNA
attcggtgcgtg

SEQ ID NO: 45670 - DNA, 12 bp, synthetic construct
  misc_feature 1..12: note = synthetic [barcode part2]
  source 1..12: mol_type = other DNA
ttctaacaccgc

SEQ ID NO: 45671 - DNA, 12 bp, synthetic construct
  misc_feature 1..12: note = synthetic [barcode part2]
  source 1..12: mol_type = other DNA
atgcggtccgat

SEQ ID NO: 45672 - DNA, 12 bp, synthetic construct
  misc_feature 1..12: note = synthetic [barcode part2]
  source 1..12: mol_type = other DNA
acactggaccgt

SEQ ID NO: 45673 - DNA, 12 bp, synthetic construct
  misc_feature 1..12: note = synthetic [barcode part2]
  source 1..12: mol_type = other DNA
atacggtctaac

SEQ ID NO: 45674 - DNA, 12 bp, synthetic construct
  misc_feature 1..12: note = synthetic [barcode part2]
  source 1..12: mol_type = other DNA
tgccaatgaccg

SEQ ID NO: 45675 - DNA, 12 bp, synthetic construct
  misc_feature 1..12: note = synthetic [barcode part2]
  source 1..12: mol_type = other DNA
cgagttacatac

SEQ ID NO: 45676 - DNA, 12 bp, synthetic construct
  misc_feature 1..12: note = synthetic [barcode part2]
  source 1..12: mol_type = other DNA
acaccagattgt

SEQ ID NO: 45677 - DNA, 12 bp, synthetic construct
  misc_feature 1..12: note = synthetic [barcode part2]
  source 1..12: mol_type = other DNA
atagtcggattc

SEQ ID NO: 45678 - DNA, 12 bp, synthetic construct
  misc_feature 1..12: note = synthetic [barcode part2]
  source 1..12: mol_type = other DNA
atgccgataact

SEQ ID NO: 45679 - DNA, 12 bp, synthetic construct
  misc_feature 1..12: note = synthetic [barcode part2]
  source 1..12: mol_type = other DNA
caacgaccatat

SEQ ID NO: 45680 - DNA, 12 bp, synthetic construct
  misc_feature 1..12: note = synthetic [barcode part2]
  source 1..12: mol_type = other DNA
tccactaaccgt

SEQ ID NO: 45681 - DNA, 12 bp, synthetic construct
  misc_feature 1..12: note = synthetic [barcode part2]
  source 1..12: mol_type = other DNA
agatcggagttg

SEQ ID NO: 45682 - DNA, 12 bp, synthetic construct
  misc_feature 1..12: note = synthetic [barcode part2]
  source 1..12: mol_type = other DNA
cggtcaacttct

SEQ ID NO: 45683 - DNA, 12 bp, synthetic construct
  misc_feature 1..12: note = synthetic [barcode part2]
  source 1..12: mol_type = other DNA
cgtcatacttcg

SEQ ID NO: 45684 - DNA, 12 bp, synthetic construct
  misc_feature 1..12: note = synthetic [barcode part2]
  source 1..12: mol_type = other DNA
caacgtgaccgt

SEQ ID NO: 45685 - DNA, 12 bp, synthetic construct
  misc_feature 1..12: note = synthetic [barcode part2]
  source 1..12: mol_type = other DNA
cagtgtaaccgc

SEQ ID NO: 45686 - DNA, 12 bp, synthetic construct
  misc_feature 1..12: note = synthetic [barcode part2]
  source 1..12: mol_type = other DNA
tctgccatgatc

SEQ ID NO: 45687 - DNA, 12 bp, synthetic construct
  misc_feature 1..12: note = synthetic [barcode part2]
  source 1..12: mol_type = other DNA
tggtgcgtagtc

SEQ ID NO: 45688 - DNA, 12 bp, synthetic construct
  misc_feature 1..12: note = synthetic [barcode part2]
  source 1..12: mol_type = other DNA
tattggcgattg

SEQ ID NO: 45689 - DNA, 12 bp, synthetic construct
  misc_feature 1..12: note = synthetic [barcode part2]
  source 1..12: mol_type = other DNA
tgcactagattg

SEQ ID NO: 45690 - DNA, 12 bp, synthetic construct
  misc_feature 1..12: note = synthetic [barcode part2]
  source 1..12: mol_type = other DNA
acgtcggatcac

SEQ ID NO: 45691 - DNA, 12 bp, synthetic construct
  misc_feature 1..12: note = synthetic [barcode part2]
  source 1..12: mol_type = other DNA
ttcgtcgatcac

SEQ ID NO: 45692 - DNA, 12 bp, synthetic construct
  misc_feature 1..12: note = synthetic [barcode part2]
  source 1..12: mol_type = other DNA
cgatgtatgatc

SEQ ID NO: 45693 - DNA, 12 bp, synthetic construct
  misc_feature 1..12: note = synthetic [barcode part2]
  source 1..12: mol_type = other DNA
accatactagtg

SEQ ID NO: 45694 - DNA, 12 bp, synthetic construct
  misc_feature 1..12: note = synthetic [barcode part2]
  source 1..12: mol_type = other DNA
tggtgtacggtc

SEQ ID NO: 45695 - DNA, 12 bp, synthetic construct
  misc_feature 1..12: note = synthetic [barcode part2]
  source 1..12: mol_type = other DNA
cgaacgcactac

SEQ ID NO: 45696 - DNA, 12 bp, synthetic construct
  misc_feature 1..12: note = synthetic [barcode part2]
  source 1..12: mol_type = other DNA
tctatcaaccgc

SEQ ID NO: 45697 - DNA, 12 bp, synthetic construct
  misc_feature 1..12: note = synthetic [barcode part2]
  source 1..12: mol_type = other DNA
agttacaccgat

SEQ ID NO: 45698 - DNA, 12 bp, synthetic construct
  misc_feature 1..12: note = synthetic [barcode part2]
  source 1..12: mol_type = other DNA
cgagttatgcgc

SEQ ID NO: 45699 - DNA, 12 bp, synthetic construct
  misc_feature 1..12: note = synthetic [barcode part2]
  source 1..12: mol_type = other DNA
tgccggtaactg

SEQ ID NO: 45700 - DNA, 12 bp, synthetic construct
  misc_feature 1..12: note = synthetic [barcode part2]
  source 1..12: mol_type = other DNA
tatggtctagtg

SEQ ID NO: 45701 - DNA, 12 bp, synthetic construct
  misc_feature 1..12: note = synthetic [barcode part2]
  source 1..12: mol_type = other DNA
atgaccgtcggt

SEQ ID NO: 45702 - DNA, 12 bp, synthetic construct
  misc_feature 1..12: note = synthetic [barcode part2]
  source 1..12: mol_type = other DNA
ttacggtcttcg

SEQ ID NO: 45703 - DNA, 12 bp, synthetic construct
  misc_feature 1..12: note = synthetic [barcode part2]
  source 1..12: mol_type = other DNA
tcggttattccg

SEQ ID NO: 45704 - DNA, 12 bp, synthetic construct
  misc_feature 1..12: note = synthetic [barcode part2]
  source 1..12: mol_type = other DNA
ttcgcacgtatc

SEQ ID NO: 45705 - DNA, 12 bp, synthetic construct
  misc_feature 1..12: note = synthetic [barcode part2]
  source 1..12: mol_type = other DNA
ttcggaactctc

SEQ ID NO: 45706 - DNA, 12 bp, synthetic construct
  misc_feature 1..12: note = synthetic [barcode part2]
  source 1..12: mol_type = other DNA
tgaacgcaccgt

SEQ ID NO: 45707 - DNA, 12 bp, synthetic construct
  misc_feature 1..12: note = synthetic [barcode part2]
  source 1..12: mol_type = other DNA
aacgtgcggtct

SEQ ID NO: 45708 - DNA, 12 bp, synthetic construct
  misc_feature 1..12: note = synthetic [barcode part2]
  source 1..12: mol_type = other DNA
tccgttagtcgt

SEQ ID NO: 45709 - DNA, 12 bp, synthetic construct
  misc_feature 1..12: note = synthetic [barcode part2]
  source 1..12: mol_type = other DNA
cgacgactacac

SEQ ID NO: 45710 - DNA, 12 bp, synthetic construct
  misc_feature 1..12: note = synthetic [barcode part2]
  source 1..12: mol_type = other DNA
cggtatggttat

SEQ ID NO: 45711 - DNA, 12 bp, synthetic construct
  misc_feature 1..12: note = synthetic [barcode part2]
  source 1..12: mol_type = other DNA
acggtatgagac

SEQ ID NO: 45712 - DNA, 12 bp, synthetic construct
  misc_feature 1..12: note = synthetic [barcode part2]
  source 1..12: mol_type = other DNA
acggttagattc

SEQ ID NO: 45713 - DNA, 12 bp, synthetic construct
  misc_feature 1..12: note = synthetic [barcode part2]
  source 1..12: mol_type = other DNA
cggtgatcgtgt

SEQ ID NO: 45714 - DNA, 12 bp, synthetic construct
  misc_feature 1..12: note = synthetic [barcode part2]
  source 1..12: mol_type = other DNA
ttctatgcacgc

SEQ ID NO: 45715 - DNA, 12 bp, synthetic construct
  misc_feature 1..12: note = synthetic [barcode part2]
  source 1..12: mol_type = other DNA
cgatagttacac

SEQ ID NO: 45716 - DNA, 12 bp, synthetic construct
  misc_feature 1..12: note = synthetic [barcode part2]
  source 1..12: mol_type = other DNA
tgacacggttat

SEQ ID NO: 45717 - DNA, 12 bp, synthetic construct
  misc_feature 1..12: note = synthetic [barcode part2]
  source 1..12: mol_type = other DNA
cgacgtgtagtc

SEQ ID NO: 45718 - DNA, 12 bp, synthetic construct
  misc_feature 1..12: note = synthetic [barcode part2]
  source 1..12: mol_type = other DNA
attaccggtatg

SEQ ID NO: 45719 - DNA, 12 bp, synthetic construct
  misc_feature 1..12: note = synthetic [barcode part2]
  source 1..12: mol_type = other DNA
ttccggtcaatc

SEQ ID NO: 45720 - DNA, 12 bp, synthetic construct
  misc_feature 1..12: note = synthetic [barcode part2]
  source 1..12: mol_type = other DNA
cgacaatcatac

SEQ ID NO: 45721 - DNA, 12 bp, synthetic construct
  misc_feature 1..12: note = synthetic [barcode part2]
  source 1..12: mol_type = other DNA
atagaccgttac

SEQ ID NO: 45722 - DNA, 12 bp, synthetic construct
  misc_feature 1..12: note = synthetic [barcode part2]
  source 1..12: mol_type = other DNA
cgatgtagtcgc

SEQ ID NO: 45723 - DNA, 12 bp, synthetic construct
  misc_feature 1..12: note = synthetic [barcode part2]
  source 1..12: mol_type = other DNA
tccgattctggt

SEQ ID NO: 45724 - DNA, 12 bp, synthetic construct
  misc_feature 1..12: note = synthetic [barcode part2]
  source 1..12: mol_type = other DNA
acggaccactac

SEQ ID NO: 45725 - DNA, 12 bp, synthetic construct
  misc_feature 1..12: note = synthetic [barcode part2]
  source 1..12: mol_type = other DNA
tctgtcgattgc

SEQ ID NO: 45726 - DNA, 12 bp, synthetic construct
  misc_feature 1..12: note = synthetic [barcode part2]
  source 1..12: mol_type = other DNA
caccaataactg

SEQ ID NO: 45727 - DNA, 12 bp, synthetic construct
  misc_feature 1..12: note = synthetic [barcode part2]
  source 1..12: mol_type = other DNA
agtacatctggt

SEQ ID NO: 45728 - DNA, 12 bp, synthetic construct
  misc_feature 1..12: note = synthetic [barcode part2]
  source 1..12: mol_type = other DNA
tgaccagtctct

SEQ ID NO: 45729 - DNA, 12 bp, synthetic construct
  misc_feature 1..12: note = synthetic [barcode part2]
  source 1..12: mol_type = other DNA
ataccagactac

SEQ ID NO: 45730 - DNA, 12 bp, synthetic construct
  misc_feature 1..12: note = synthetic [barcode part2]
  source 1..12: mol_type = other DNA
acagtcgtcggt

SEQ ID NO: 45731 - DNA, 12 bp, synthetic construct
  misc_feature 1..12: note = synthetic [barcode part2]
  source 1..12: mol_type = other DNA
attgtcgacatg

SEQ ID NO: 45732 - DNA, 12 bp, synthetic construct
  misc_feature 1..12: note = synthetic [barcode part2]
  source 1..12: mol_type = other DNA
taacggtcatac

SEQ ID NO: 45733 - DNA, 12 bp, synthetic construct
  misc_feature 1..12: note = synthetic [barcode part2]
  source 1..12: mol_type = other DNA
tatcgacaactg

SEQ ID NO: 45734 - DNA, 12 bp, synthetic construct
  misc_feature 1..12: note = synthetic [barcode part2]
  source 1..12: mol_type = other DNA
tggactacgcac

SEQ ID NO: 45735 - DNA, 12 bp, synthetic construct
  misc_feature 1..12: note = synthetic [barcode part2]
  source 1..12: mol_type = other DNA
tccgtgccatat

SEQ ID NO: 45736 - DNA, 12 bp, synthetic construct
  misc_feature 1..12: note = synthetic [barcode part2]
  source 1..12: mol_type = other DNA
aaccggtgaagt

SEQ ID NO: 45737 - DNA, 12 bp, synthetic construct
  misc_feature 1..12: note = synthetic [barcode part2]
  source 1..12: mol_type = other DNA
acggttattgac

SEQ ID NO: 45738 - DNA, 12 bp, synthetic construct
  misc_feature 1..12: note = synthetic [barcode part2]
  source 1..12: mol_type = other DNA
tgacgcaatcat

SEQ ID NO: 45739 - DNA, 12 bp, synthetic construct
  misc_feature 1..12: note = synthetic [barcode part2]
  source 1..12: mol_type = other DNA
ttccgacactac

SEQ ID NO: 45740 - DNA, 12 bp, synthetic construct
  misc_feature 1..12: note = synthetic [barcode part2]
  source 1..12: mol_type = other DNA
taagtgcattgc

SEQ ID NO: 45741 - DNA, 12 bp, synthetic construct
  misc_feature 1..12: note = synthetic [barcode part2]
  source 1..12: mol_type = other DNA
tggtagtacatc

SEQ ID NO: 45742 - DNA, 12 bp, synthetic construct
  misc_feature 1..12: note = synthetic [barcode part2]
  source 1..12: mol_type = other DNA
tcttacacacgc

SEQ ID NO: 45743 - DNA, 12 bp, synthetic construct
  misc_feature 1..12: note = synthetic [barcode part2]
  source 1..12: mol_type = other DNA
taagtgccggtc

SEQ ID NO: 45744 - DNA, 12 bp, synthetic construct
  misc_feature 1..12: note = synthetic [barcode part2]
  source 1..12: mol_type = other DNA
accgccaatgtg

SEQ ID NO: 45745 - DNA, 12 bp, synthetic construct
  misc_feature 1..12: note = synthetic [barcode part2]
  source 1..12: mol_type = other DNA
caccatactctg

SEQ ID NO: 45746 - DNA, 12 bp, synthetic construct
  misc_feature 1..12: note = synthetic [barcode part2]
  source 1..12: mol_type = other DNA
cggtgcgattgt

SEQ ID NO: 45747 - DNA, 12 bp, synthetic construct
  misc_feature 1..12: note = synthetic [barcode part2]
  source 1..12: mol_type = other DNA
aacgtatctggt

SEQ ID NO: 45748 - DNA, 12 bp, synthetic construct
  misc_feature 1..12: note = synthetic [barcode part2]
  source 1..12: mol_type = other DNA
tgaaccgcacgt

SEQ ID NO: 45749 - DNA, 12 bp, synthetic construct
  misc_feature 1..12: note = synthetic [barcode part2]
  source 1..12: mol_type = other DNA
tccgccaatcat

SEQ ID NO: 45750 - DNA, 12 bp, synthetic construct
  misc_feature 1..12: note = synthetic [barcode part2]
  source 1..12: mol_type = other DNA
tatcgcacttcg

SEQ ID NO: 45751 - DNA, 12 bp, synthetic construct
  misc_feature 1..12: note = synthetic [barcode part2]
  source 1..12: mol_type = other DNA
cggtgtacgact

SEQ ID NO: 45752 - DNA, 12 bp, synthetic construct
  misc_feature 1..12: note = synthetic [barcode part2]
  source 1..12: mol_type = other DNA
tgaatcacgcat

SEQ ID NO: 45753 - DNA, 12 bp, synthetic construct
  misc_feature 1..12: note = synthetic [barcode part2]
  source 1..12: mol_type = other DNA
ttcgcgtcatac

SEQ ID NO: 45754 - DNA, 12 bp, synthetic construct
  misc_feature 1..12: note = synthetic [barcode part2]
  source 1..12: mol_type = other DNA
cggatgtaccgt

SEQ ID NO: 45755 - DNA, 12 bp, synthetic construct
  misc_feature 1..12: note = synthetic [barcode part2]
  source 1..12: mol_type = other DNA
tctgccaactac

SEQ ID NO: 45756 - DNA, 12 bp, synthetic construct
  misc_feature 1..12: note = synthetic [barcode part2]
  source 1..12: mol_type = other DNA
atggtcgaatct

SEQ ID NO: 45757 - DNA, 12 bp, synthetic construct
  misc_feature 1..12: note = synthetic [barcode part2]
  source 1..12: mol_type = other DNA
agtcatactggt

SEQ ID NO: 45758 - DNA, 12 bp, synthetic construct
  misc_feature 1..12: note = synthetic [barcode part2]
  source 1..12: mol_type = other DNA
accgattcttcg

SEQ ID NO: 45759 - DNA, 12 bp, synthetic construct
  misc_feature 1..12: note = synthetic [barcode part2]
  source 1..12: mol_type = other DNA
tggcacgattgc

SEQ ID NO: 45760 - DNA, 12 bp, synthetic construct
  misc_feature 1..12: note = synthetic [barcode part2]
  source 1..12: mol_type = other DNA
acagttactggt

SEQ ID NO: 45761 - DNA, 12 bp, synthetic construct
  misc_feature 1..12: note = synthetic [barcode part2]
  source 1..12: mol_type = other DNA
caactggtctct

SEQ ID NO: 45762 - DNA, 12 bp, synthetic construct
  misc_feature 1..12: note = synthetic [barcode part2]
  source 1..12: mol_type = other DNA
tcgtatgaatcg

SEQ ID NO: 45763 - DNA, 12 bp, synthetic construct
  misc_feature 1..12: note = synthetic [barcode part2]
  source 1..12: mol_type = other DNA
tcgacgcagttg

SEQ ID NO: 45764 - DNA, 12 bp, synthetic construct
  misc_feature 1..12: note = synthetic [barcode part2]
  source 1..12: mol_type = other DNA
cgtaccgaatcg

SEQ ID NO: 45765 - DNA, 12 bp, synthetic construct
  misc_feature 1..12: note = synthetic [barcode part2]
  source 1..12: mol_type = other DNA
agacacggtatg

SEQ ID NO: 45766 - DNA, 12 bp, synthetic construct
  misc_feature 1..12: note = synthetic [barcode part2]
  source 1..12: mol_type = other DNA
tggcatatagtc

SEQ ID NO: 45767 - DNA, 12 bp, synthetic construct
  misc_feature 1..12: note = synthetic [barcode part2]
  source 1..12: mol_type = other DNA
tggtatggtcgc

SEQ ID NO: 45768 - DNA, 12 bp, synthetic construct
  misc_feature 1..12: note = synthetic [barcode part2]
  source 1..12: mol_type = other DNA
aactacaccagt

SEQ ID NO: 45769 - DNA, 12 bp, synthetic construct
  misc_feature 1..12: note = synthetic [barcode part2]
  source 1..12: mol_type = other DNA
tggtatgactac

SEQ ID NO: 45770 - DNA, 12 bp, synthetic construct
  misc_feature 1..12: note = synthetic [barcode part2]
  source 1..12: mol_type = other DNA
acgaccgttgac

SEQ ID NO: 45771 - DNA, 12 bp, synthetic construct
  misc_feature 1..12: note = synthetic [barcode part2]
  source 1..12: mol_type = other DNA
ccatatggaccg

SEQ ID NO: 45772 - DNA, 12 bp, synthetic construct
  misc_feature 1..12: note = synthetic [barcode part2]
  source 1..12: mol_type = other DNA
ttcatactgcgc

SEQ ID NO: 45773 - DNA, 12 bp, synthetic construct
  misc_feature 1..12: note = synthetic [barcode part2]
  source 1..12: mol_type = other DNA
ttccggtgttac

SEQ ID NO: 45774 - DNA, 12 bp, synthetic construct
  misc_feature 1..12: note = synthetic [barcode part2]
  source 1..12: mol_type = other DNA
taacgtgactac

SEQ ID NO: 45775 - DNA, 12 bp, synthetic construct
  misc_feature 1..12: note = synthetic [barcode part2]
  source 1..12: mol_type = other DNA
aagtgcggtatg

SEQ ID NO: 45776 - DNA, 12 bp, synthetic construct
  misc_feature 1..12: note = synthetic [barcode part2]
  source 1..12: mol_type = other DNA
tagtcggagagt

SEQ ID NO: 45777 - DNA, 12 bp, synthetic construct
  misc_feature 1..12: note = synthetic [barcode part2]
  source 1..12: mol_type = other DNA
ttagattacgcg

SEQ ID NO: 45778 - DNA, 12 bp, synthetic construct
  misc_feature 1..12: note = synthetic [barcode part2]
  source 1..12: mol_type = other DNA
agtcacgtcggt

SEQ ID NO: 45779 - DNA, 12 bp, synthetic construct
  misc_feature 1..12: note = synthetic [barcode part2]
  source 1..12: mol_type = other DNA
aaccgacgagat

SEQ ID NO: 45780 - DNA, 12 bp, synthetic construct
  misc_feature 1..12: note = synthetic [barcode part2]
  source 1..12: mol_type = other DNA
tctcggttgatc

SEQ ID NO: 45781 - DNA, 12 bp, synthetic construct
  misc_feature 1..12: note = synthetic [barcode part2]
  source 1..12: mol_type = other DNA
ttagaagtggcg

SEQ ID NO: 45782 - DNA, 12 bp, synthetic construct
  misc_feature 1..12: note = synthetic [barcode part2]
  source 1..12: mol_type = other DNA
taacgcagttac

SEQ ID NO: 45783 - DNA, 12 bp, synthetic construct
  misc_feature 1..12: note = synthetic [barcode part2]
  source 1..12: mol_type = other DNA
tagattgcgcat

SEQ ID NO: 45784 - DNA, 12 bp, synthetic construct
  misc_feature 1..12: note = synthetic [barcode part2]
  source 1..12: mol_type = other DNA
tgacgcacgact

SEQ ID NO: 45785 - DNA, 12 bp, synthetic construct
  misc_feature 1..12: note = synthetic [barcode part2]
  source 1..12: mol_type = other DNA
accataccgacg

SEQ ID NO: 45786 - DNA, 12 bp, synthetic construct
  misc_feature 1..12: note = synthetic [barcode part2]
  source 1..12: mol_type = other DNA
accagagaactg

SEQ ID NO: 45787 - DNA, 12 bp, synthetic construct
  misc_feature 1..12: note = synthetic [barcode part2]
  source 1..12: mol_type = other DNA
ttcggtctcaac

SEQ ID NO: 45788 - DNA, 12 bp, synthetic construct
  misc_feature 1..12: note = synthetic [barcode part2]
  source 1..12: mol_type = other DNA
attcggtatacg

SEQ ID NO: 45789 - DNA, 12 bp, synthetic construct
  misc_feature 1..12: note = synthetic [barcode part2]
  source 1..12: mol_type = other DNA
cggttagagagt

SEQ ID NO: 45790 - DNA, 12 bp, synthetic construct
  misc_feature 1..12: note = synthetic [barcode part2]
  source 1..12: mol_type = other DNA
acatgattcggt

SEQ ID NO: 45791 - DNA, 12 bp, synthetic construct
  misc_feature 1..12: note = synthetic [barcode part2]
  source 1..12: mol_type = other DNA
acagaccatcat

SEQ ID NO: 45792 - DNA, 12 bp, synthetic construct
  misc_feature 1..12: note = synthetic [barcode part2]
  source 1..12: mol_type = other DNA
atggttatcggt

SEQ ID NO: 45793 - DNA, 12 bp, synthetic construct
  misc_feature 1..12: note = synthetic [barcode part2]
  source 1..12: mol_type = other DNA
ttacgtgaatcg

SEQ ID NO: 45794 - DNA, 12 bp, synthetic construct
  misc_feature 1..12: note = synthetic [barcode part2]
  source 1..12: mol_type = other DNA
tctcatacgcac

SEQ ID NO: 45795 - DNA, 12 bp, synthetic construct
  misc_feature 1..12: note = synthetic [barcode part2]
  source 1..12: mol_type = other DNA
tggatcacatac

SEQ ID NO: 45796 - DNA, 12 bp, synthetic construct
  misc_feature 1..12: note = synthetic [barcode part2]
  source 1..12: mol_type = other DNA
tatctaacgacg

SEQ ID NO: 45797 - DNA, 12 bp, synthetic construct
  misc_feature 1..12: note = synthetic [barcode part2]
  source 1..12: mol_type = other DNA
tgatagtcgcat

SEQ ID NO: 45798 - DNA, 12 bp, synthetic construct
  misc_feature 1..12: note = synthetic [barcode part2]
  source 1..12: mol_type = other DNA
tggtgatcgcac

SEQ ID NO: 45799 - DNA, 12 bp, synthetic construct
  misc_feature 1..12: note = synthetic [barcode part2]
  source 1..12: mol_type = other DNA
ttaccgagtgcg

SEQ ID NO: 45800 - DNA, 12 bp, synthetic construct
  misc_feature 1..12: note = synthetic [barcode part2]
  source 1..12: mol_type = other DNA
cggtacaactat

SEQ ID NO: 45801 - DNA, 12 bp, synthetic construct
  misc_feature 1..12: note = synthetic [barcode part2]
  source 1..12: mol_type = other DNA
tcggcacaatcg

SEQ ID NO: 45802 - DNA, 12 bp, synthetic construct
  misc_feature 1..12: note = synthetic [barcode part2]
  source 1..12: mol_type = other DNA
taatgatcgtgc

SEQ ID NO: 45803 - DNA, 12 bp, synthetic construct
  misc_feature 1..12: note = synthetic [barcode part2]
  source 1..12: mol_type = other DNA
cgacggttatgc

SEQ ID NO: 45804 - DNA, 12 bp, synthetic construct
  misc_feature 1..12: note = synthetic [barcode part2]
  source 1..12: mol_type = other DNA
ttagtgcagttg

SEQ ID NO: 45805 - DNA, 12 bp, synthetic construct
  misc_feature 1..12: note = synthetic [barcode part2]
  source 1..12: mol_type = other DNA
atatcggcggtc

SEQ ID NO: 45806 - DNA, 12 bp, synthetic construct
  misc_feature 1..12: note = synthetic [barcode part2]
  source 1..12: mol_type = other DNA
tccgcgtatact

SEQ ID NO: 45807 - DNA, 12 bp, synthetic construct
  misc_feature 1..12: note = synthetic [barcode part2]
  source 1..12: mol_type = other DNA
taacgtgtgatc

SEQ ID NO: 45808 - DNA, 12 bp, synthetic construct
  misc_feature 1..12: note = synthetic [barcode part2]
  source 1..12: mol_type = other DNA
taagaccgagac

SEQ ID NO: 45809 - DNA, 12 bp, synthetic construct
  misc_feature 1..12: note = synthetic [barcode part2]
  source 1..12: mol_type = other DNA
ttccgtgacatc

SEQ ID NO: 45810 - DNA, 12 bp, synthetic construct
  misc_feature 1..12: note = synthetic [barcode part2]
  source 1..12: mol_type = other DNA
tcttgatcggtc

SEQ ID NO: 45811 - DNA, 12 bp, synthetic construct
  misc_feature 1..12: note = synthetic [barcode part2]
  source 1..12: mol_type = other DNA
ttattgaacgcg

SEQ ID NO: 45812 - DNA, 12 bp, synthetic construct
  misc_feature 1..12: note = synthetic [barcode part2]
  source 1..12: mol_type = other DNA
tgcggtctaacg

SEQ ID NO: 45813 - DNA, 12 bp, synthetic construct
  misc_feature 1..12: note = synthetic [barcode part2]
  source 1..12: mol_type = other DNA
aatgaccacatc

SEQ ID NO: 45814 - DNA, 12 bp, synthetic construct
  misc_feature 1..12: note = synthetic [barcode part2]
  source 1..12: mol_type = other DNA
accaccgacatg

SEQ ID NO: 45815 - DNA, 12 bp, synthetic construct
  misc_feature 1..12: note = synthetic [barcode part2]
  source 1..12: mol_type = other DNA
tagtaacgcact

SEQ ID NO: 45816 - DNA, 12 bp, synthetic construct
  misc_feature 1..12: note = synthetic [barcode part2]
  source 1..12: mol_type = other DNA
ttaccgaacatg

SEQ ID NO: 45817 - DNA, 12 bp, synthetic construct
  misc_feature 1..12: note = synthetic [barcode part2]
  source 1..12: mol_type = other DNA
tcgatacaactg

SEQ ID NO: 45818 - DNA, 12 bp, synthetic construct
  misc_feature 1..12: note = synthetic [barcode part2]
  source 1..12: mol_type = other DNA
agaagttggtcg

SEQ ID NO: 45819 - DNA, 12 bp, synthetic construct
  misc_feature 1..12: note = synthetic [barcode part2]
  source 1..12: mol_type = other DNA
agttctcaccgt

SEQ ID NO: 45820 - DNA, 12 bp, synthetic construct
  misc_feature 1..12: note = synthetic [barcode part2]
  source 1..12: mol_type = other DNA
aattcggtatgc

SEQ ID NO: 45821 - DNA, 12 bp, synthetic construct
  misc_feature 1..12: note = synthetic [barcode part2]
  source 1..12: mol_type = other DNA
ttagaccgtgcg

SEQ ID NO: 45822 - DNA, 12 bp, synthetic construct
  misc_feature 1..12: note = synthetic [barcode part2]
  source 1..12: mol_type = other DNA
tgacgacgcact

SEQ ID NO: 45823 - DNA, 12 bp, synthetic construct
  misc_feature 1..12: note = synthetic [barcode part2]
  source 1..12: mol_type = other DNA
tcttgatgccac

SEQ ID NO: 45824 - DNA, 12 bp, synthetic construct
  misc_feature 1..12: note = synthetic [barcode part2]
  source 1..12: mol_type = other DNA
cgttgatggtcg

SEQ ID NO: 45825 - DNA, 12 bp, synthetic construct
  misc_feature 1..12: note = synthetic [barcode part2]
  source 1..12: mol_type = other DNA
cggtgtaatcat

SEQ ID NO: 45826 - DNA, 12 bp, synthetic construct
  misc_feature 1..12: note = synthetic [barcode part2]
  source 1..12: mol_type = other DNA
caatacaaccgt

SEQ ID NO: 45827 - DNA, 12 bp, synthetic construct
  misc_feature 1..12: note = synthetic [barcode part2]
  source 1..12: mol_type = other DNA
tgcaatccgacg

SEQ ID NO: 45828 - DNA, 12 bp, synthetic construct
  misc_feature 1..12: note = synthetic [barcode part2]
  source 1..12: mol_type = other DNA
ttccatacgtgc

SEQ ID NO: 45829 - DNA, 12 bp, synthetic construct
  misc_feature 1..12: note = synthetic [barcode part2]
  source 1..12: mol_type = other DNA
tccatgtcgcat

SEQ ID NO: 45830 - DNA, 12 bp, synthetic construct
  misc_feature 1..12: note = synthetic [barcode part2]
  source 1..12: mol_type = other DNA
tggatgtactac

SEQ ID NO: 45831 - DNA, 12 bp, synthetic construct
  misc_feature 1..12: note = synthetic [barcode part2]
  source 1..12: mol_type = other DNA
ttagtcgttccg

SEQ ID NO: 45832 - DNA, 12 bp, synthetic construct
  misc_feature 1..12: note = synthetic [barcode part2]
  source 1..12: mol_type = other DNA
accactaacgcg

SEQ ID NO: 45833 - DNA, 12 bp, synthetic construct
  misc_feature 1..12: note = synthetic [barcode part2]
  source 1..12: mol_type = other DNA
cagtacacggtc

SEQ ID NO: 45834 - DNA, 12 bp, synthetic construct
  misc_feature 1..12: note = synthetic [barcode part2]
  source 1..12: mol_type = other DNA
cgtgattcggtg

SEQ ID NO: 45835 - DNA, 12 bp, synthetic construct
  misc_feature 1..12: note = synthetic [barcode part2]
  source 1..12: mol_type = other DNA
tgcaatctagtg

SEQ ID NO: 45836 - DNA, 12 bp, synthetic construct
  misc_feature 1..12: note = synthetic [barcode part2]
  source 1..12: mol_type = other DNA
tagatgtgccat

SEQ ID NO: 45837 - DNA, 12 bp, synthetic construct
  misc_feature 1..12: note = synthetic [barcode part2]
  source 1..12: mol_type = other DNA
tggaatcggaac

SEQ ID NO: 45838 - DNA, 12 bp, synthetic construct
  misc_feature 1..12: note = synthetic [barcode part2]
  source 1..12: mol_type = other DNA
tctcttcggaac

SEQ ID NO: 45839 - DNA, 12 bp, synthetic construct
  misc_feature 1..12: note = synthetic [barcode part2]
  source 1..12: mol_type = other DNA
tattcggtagtg

SEQ ID NO: 45840 - DNA, 12 bp, synthetic construct
  misc_feature 1..12: note = synthetic [barcode part2]
  source 1..12: mol_type = other DNA
cgacggtatgtc

SEQ ID NO: 45841 - DNA, 12 bp, synthetic construct
  misc_feature 1..12: note = synthetic [barcode part2]
  source 1..12: mol_type = other DNA
cggcggtcatat

SEQ ID NO: 45842 - DNA, 12 bp, synthetic construct
  misc_feature 1..12: note = synthetic [barcode part2]
  source 1..12: mol_type = other DNA
aaccgcattagt

SEQ ID NO: 45843 - DNA, 12 bp, synthetic construct
  misc_feature 1..12: note = synthetic [barcode part2]
  source 1..12: mol_type = other DNA
tcgaactgcgtg

SEQ ID NO: 45844 - DNA, 12 bp, synthetic construct
  misc_feature 1..12: note = synthetic [barcode part2]
  source 1..12: mol_type = other DNA
ccaccagatacg

SEQ ID NO: 45845 - DNA, 12 bp, synthetic construct
  misc_feature 1..12: note = synthetic [barcode part2]
  source 1..12: mol_type = other DNA
taagttacgcac

SEQ ID NO: 45846 - DNA, 12 bp, synthetic construct
  misc_feature 1..12: note = synthetic [barcode part2]
  source 1..12: mol_type = other DNA
tcgattgtctcg

SEQ ID NO: 45847 - DNA, 12 bp, synthetic construct
  misc_feature 1..12: note = synthetic [barcode part2]
  source 1..12: mol_type = other DNA
cgaacataccgc

SEQ ID NO: 45848 - DNA, 12 bp, synthetic construct
  misc_feature 1..12: note = synthetic [barcode part2]
  source 1..12: mol_type = other DNA
tagatcacgtgt

SEQ ID NO: 45849 - DNA, 12 bp, synthetic construct
  misc_feature 1..12: note = synthetic [barcode part2]
  source 1..12: mol_type = other DNA
tggcgacacatc

SEQ ID NO: 45850 - DNA, 12 bp, synthetic construct
  misc_feature 1..12: note = synthetic [barcode part2]
  source 1..12: mol_type = other DNA
ttcttccgagac

SEQ ID NO: 45851 - DNA, 12 bp, synthetic construct
  misc_feature 1..12: note = synthetic [barcode part2]
  source 1..12: mol_type = other DNA
tggcgtggttac

SEQ ID NO: 45852 - DNA, 12 bp, synthetic construct
  misc_feature 1..12: note = synthetic [barcode part2]
  source 1..12: mol_type = other DNA
tggattggtatc

SEQ ID NO: 45853 - DNA, 12 bp, synthetic construct
  misc_feature 1..12: note = synthetic [barcode part2]
  source 1..12: mol_type = other DNA
tgagtcgtgcgt

SEQ ID NO: 45854 - DNA, 12 bp, synthetic construct
  misc_feature 1..12: note = synthetic [barcode part2]
  source 1..12: mol_type = other DNA
cgtatcagaccg

SEQ ID NO: 45855 - DNA, 12 bp, synthetic construct
  misc_feature 1..12: note = synthetic [barcode part2]
  source 1..12: mol_type = other DNA
taagtcgcgtgc

SEQ ID NO: 45856 - DNA, 12 bp, synthetic construct
  misc_feature 1..12: note = synthetic [barcode part2]
  source 1..12: mol_type = other DNA
ttacttccggtg

SEQ ID NO: 45857 - DNA, 12 bp, synthetic construct
  misc_feature 1..12: note = synthetic [barcode part2]
  source 1..12: mol_type = other DNA
cgtgagaatacg

SEQ ID NO: 45858 - DNA, 12 bp, synthetic construct
  misc_feature 1..12: note = synthetic [barcode part2]
  source 1..12: mol_type = other DNA
acaaccgtcaat

SEQ ID NO: 45859 - DNA, 12 bp, synthetic construct
  misc_feature 1..12: note = synthetic [barcode part2]
  source 1..12: mol_type = other DNA
tctataccacgc

SEQ ID NO: 45860 - DNA, 12 bp, synthetic construct
  misc_feature 1..12: note = synthetic [barcode part2]
  source 1..12: mol_type = other DNA
ttatcggatgtg

SEQ ID NO: 45861 - DNA, 12 bp, synthetic construct
  misc_feature 1..12: note = synthetic [barcode part2]
  source 1..12: mol_type = other DNA
agtctctaccgt

SEQ ID NO: 45862 - DNA, 12 bp, synthetic construct
  misc_feature 1..12: note = synthetic [barcode part2]
  source 1..12: mol_type = other DNA
agacggttagtg

SEQ ID NO: 45863 - DNA, 12 bp, synthetic construct
  misc_feature 1..12: note = synthetic [barcode part2]
  source 1..12: mol_type = other DNA
accacattggcg

SEQ ID NO: 45864 - DNA, 12 bp, synthetic construct
  misc_feature 1..12: note = synthetic [barcode part2]
  source 1..12: mol_type = other DNA
ttccaatgccac

SEQ ID NO: 45865 - DNA, 12 bp, synthetic construct
  misc_feature 1..12: note = synthetic [barcode part2]
  source 1..12: mol_type = other DNA
taagtcggcgtc

SEQ ID NO: 45866 - DNA, 12 bp, synthetic construct
  misc_feature 1..12: note = synthetic [barcode part2]
  source 1..12: mol_type = other DNA
tgcgttagaccg

SEQ ID NO: 45867 - DNA, 12 bp, synthetic construct
  misc_feature 1..12: note = synthetic [barcode part2]
  source 1..12: mol_type = other DNA
acgactaccgac

SEQ ID NO: 45868 - DNA, 12 bp, synthetic construct
  misc_feature 1..12: note = synthetic [barcode part2]
  source 1..12: mol_type = other DNA
cggtatgaccgt

SEQ ID NO: 45869 - DNA, 12 bp, synthetic construct
  misc_feature 1..12: note = synthetic [barcode part2]
  source 1..12: mol_type = other DNA
tggtgattatgc

SEQ ID NO: 45870 - DNA, 12 bp, synthetic construct
  misc_feature 1..12: note = synthetic [barcode part2]
  source 1..12: mol_type = other DNA
accgaagaatcg

SEQ ID NO: 45871 - DNA, 12 bp, synthetic construct
  misc_feature 1..12: note = synthetic [barcode part2]
  source 1..12: mol_type = other DNA
tgaacgcgttat

SEQ ID NO: 45872 - DNA, 12 bp, synthetic construct
  misc_feature 1..12: note = synthetic [barcode part2]
  source 1..12: mol_type = other DNA
ttccgcatgtac

SEQ ID NO: 45873 - DNA, 12 bp, synthetic construct
  misc_feature 1..12: note = synthetic [barcode part2]
  source 1..12: mol_type = other DNA
tctcgacgttac

SEQ ID NO: 45874 - DNA, 12 bp, synthetic construct
  misc_feature 1..12: note = synthetic [barcode part2]
  source 1..12: mol_type = other DNA
ccaatgtgaccg

SEQ ID NO: 45875 - DNA, 12 bp, synthetic construct
  misc_feature 1..12: note = synthetic [barcode part2]
  source 1..12: mol_type = other DNA
tgcagttcaatg

SEQ ID NO: 45876 - DNA, 12 bp, synthetic construct
  misc_feature 1..12: note = synthetic [barcode part2]
  source 1..12: mol_type = other DNA
ttaagttgtgcg

SEQ ID NO: 45877 - DNA, 12 bp, synthetic construct
  misc_feature 1..12: note = synthetic [barcode part2]
  source 1..12: mol_type = other DNA
tcttggcatcac

SEQ ID NO: 45878 - DNA, 12 bp, synthetic construct
  misc_feature 1..12: note = synthetic [barcode part2]
  source 1..12: mol_type = other DNA
tagttccggtct

SEQ ID NO: 45879 - DNA, 12 bp, synthetic construct
  misc_feature 1..12: note = synthetic [barcode part2]
  source 1..12: mol_type = other DNA
ataccagtgatc

SEQ ID NO: 45880 - DNA, 12 bp, synthetic construct
  misc_feature 1..12: note = synthetic [barcode part2]
  source 1..12: mol_type = other DNA
ttactggatacg

SEQ ID NO: 45881 - DNA, 12 bp, synthetic construct
  misc_feature 1..12: note = synthetic [barcode part2]
  source 1..12: mol_type = other DNA
tccaccgactat

SEQ ID NO: 45882 - DNA, 12 bp, synthetic construct
  misc_feature 1..12: note = synthetic [barcode part2]
  source 1..12: mol_type = other DNA
tattcggcgacg

SEQ ID NO: 45883 - DNA, 12 bp, synthetic construct
  misc_feature 1..12: note = synthetic [barcode part2]
  source 1..12: mol_type = other DNA
attgcactagtg

SEQ ID NO: 45884 - DNA, 12 bp, synthetic construct
  misc_feature 1..12: note = synthetic [barcode part2]
  source 1..12: mol_type = other DNA
aagtaaccggtg

SEQ ID NO: 45885 - DNA, 12 bp, synthetic construct
  misc_feature 1..12: note = synthetic [barcode part2]
  source 1..12: mol_type = other DNA
attcttcgaccg

SEQ ID NO: 45886 - DNA, 12 bp, synthetic construct
  misc_feature 1..12: note = synthetic [barcode part2]
  source 1..12: mol_type = other DNA
tggcgaccatac

SEQ ID NO: 45887 - DNA, 12 bp, synthetic construct
  misc_feature 1..12: note = synthetic [barcode part2]
  source 1..12: mol_type = other DNA
tatcacgttccg

SEQ ID NO: 45888 - DNA, 12 bp, synthetic construct
  misc_feature 1..12: note = synthetic [barcode part2]
  source 1..12: mol_type = other DNA
ttcgcgtacatc

SEQ ID NO: 45889 - DNA, 12 bp, synthetic construct
  misc_feature 1..12: note = synthetic [barcode part2]
  source 1..12: mol_type = other DNA
tcgtgtagaccg

SEQ ID NO: 45890 - DNA, 12 bp, synthetic construct
  misc_feature 1..12: note = synthetic [barcode part2]
  source 1..12: mol_type = other DNA
ccaactactctg

SEQ ID NO: 45891 - DNA, 12 bp, synthetic construct
  misc_feature 1..12: note = synthetic [barcode part2]
  source 1..12: mol_type = other DNA
tggcaattacac

SEQ ID NO: 45892 - DNA, 12 bp, synthetic construct
  misc_feature 1..12: note = synthetic [barcode part2]
  source 1..12: mol_type = other DNA
tagtgcgaccgt

SEQ ID NO: 45893 - DNA, 12 bp, synthetic construct
  misc_feature 1..12: note = synthetic [barcode part2]
  source 1..12: mol_type = other DNA
acacggtccagt

SEQ ID NO: 45894 - DNA, 12 bp, synthetic construct
  misc_feature 1..12: note = synthetic [barcode part2]
  source 1..12: mol_type = other DNA
ttccaatcggtc

SEQ ID NO: 45895 - DNA, 12 bp, synthetic construct
  misc_feature 1..12: note = synthetic [barcode part2]
  source 1..12: mol_type = other DNA
tggaccgtacac

SEQ ID NO: 45896 - DNA, 12 bp, synthetic construct
  misc_feature 1..12: note = synthetic [barcode part2]
  source 1..12: mol_type = other DNA
ttctggcattgc

SEQ ID NO: 45897 - DNA, 12 bp, synthetic construct
  misc_feature 1..12: note = synthetic [barcode part2]
  source 1..12: mol_type = other DNA
caagaccgaagt

SEQ ID NO: 45898 - DNA, 12 bp, synthetic construct
  misc_feature 1..12: note = synthetic [barcode part2]
  source 1..12: mol_type = other DNA
tccacattgcgt

SEQ ID NO: 45899 - DNA, 12 bp, synthetic construct
  misc_feature 1..12: note = synthetic [barcode part2]
  source 1..12: mol_type = other DNA
cggagttgagat

SEQ ID NO: 45900 - DNA, 12 bp, synthetic construct
  misc_feature 1..12: note = synthetic [barcode part2]
  source 1..12: mol_type = other DNA
aacagttgcact

SEQ ID NO: 45901 - DNA, 12 bp, synthetic construct
  misc_feature 1..12: note = synthetic [barcode part2]
  source 1..12: mol_type = other DNA
taacacgatcac

SEQ ID NO: 45902 - DNA, 12 bp, synthetic construct
  misc_feature 1..12: note = synthetic [barcode part2]
  source 1..12: mol_type = other DNA
acaccgaatcat

SEQ ID NO: 45903 - DNA, 12 bp, synthetic construct
  misc_feature 1..12: note = synthetic [barcode part2]
  source 1..12: mol_type = other DNA
cagaccggtatc

SEQ ID NO: 45904 - DNA, 12 bp, synthetic construct
  misc_feature 1..12: note = synthetic [barcode part2]
  source 1..12: mol_type = other DNA
tcggtgcgattg

SEQ ID NO: 45905 - DNA, 12 bp, synthetic construct
  misc_feature 1..12: note = synthetic [barcode part2]
  source 1..12: mol_type = other DNA
taacgactgtac

SEQ ID NO: 45906 - DNA, 12 bp, synthetic construct
  misc_feature 1..12: note = synthetic [barcode part2]
  source 1..12: mol_type = other DNA
agttcggtgtat

SEQ ID NO: 45907 - DNA, 12 bp, synthetic construct
  misc_feature 1..12: note = synthetic [barcode part2]
  source 1..12: mol_type = other DNA
tctcgtgtgtac

SEQ ID NO: 45908 - DNA, 12 bp, synthetic construct
  misc_feature 1..12: note = synthetic [barcode part2]
  source 1..12: mol_type = other DNA
tgacgactatgt

SEQ ID NO: 45909 - DNA, 12 bp, synthetic construct
  misc_feature 1..12: note = synthetic [barcode part2]
  source 1..12: mol_type = other DNA
ttccgtgcatac

SEQ ID NO: 45910 - DNA, 12 bp, synthetic construct
  misc_feature 1..12: note = synthetic [barcode part2]
  source 1..12: mol_type = other DNA
taatgcggccac

SEQ ID NO: 45911 - DNA, 12 bp, synthetic construct
  misc_feature 1..12: note = synthetic [barcode part2]
  source 1..12: mol_type = other DNA
tcgcatagattg

SEQ ID NO: 45912 - DNA, 12 bp, synthetic construct
  misc_feature 1..12: note = synthetic [barcode part2]
  source 1..12: mol_type = other DNA
tctcgcaacatc

SEQ ID NO: 45913 - DNA, 12 bp, synthetic construct
  misc_feature 1..12: note = synthetic [barcode part2]
  source 1..12: mol_type = other DNA
acgttgacaatc

SEQ ID NO: 45914 - DNA, 12 bp, synthetic construct
  misc_feature 1..12: note = synthetic [barcode part2]
  source 1..12: mol_type = other DNA
taacgacgtatc

SEQ ID NO: 45915 - DNA, 12 bp, synthetic construct
  misc_feature 1..12: note = synthetic [barcode part2]
  source 1..12: mol_type = other DNA
atacggttcggc

SEQ ID NO: 45916 - DNA, 12 bp, synthetic construct
  misc_feature 1..12: note = synthetic [barcode part2]
  source 1..12: mol_type = other DNA
ataccgaaccgc

SEQ ID NO: 45917 - DNA, 12 bp, synthetic construct
  misc_feature 1..12: note = synthetic [barcode part2]
  source 1..12: mol_type = other DNA
cggatcatgtat

SEQ ID NO: 45918 - DNA, 12 bp, synthetic construct
  misc_feature 1..12: note = synthetic [barcode part2]
  source 1..12: mol_type = other DNA
aatctggcgtgc

SEQ ID NO: 45919 - DNA, 12 bp, synthetic construct
  misc_feature 1..12: note = synthetic [barcode part2]
  source 1..12: mol_type = other DNA
tgatggccacgt

SEQ ID NO: 45920 - DNA, 12 bp, synthetic construct
  misc_feature 1..12: note = synthetic [barcode part2]
  source 1..12: mol_type = other DNA
tccataccgtgt

SEQ ID NO: 45921 - DNA, 12 bp, synthetic construct
  misc_feature 1..12: note = synthetic [barcode part2]
  source 1..12: mol_type = other DNA
cgtcggtgattg

SEQ ID NO: 45922 - DNA, 12 bp, synthetic construct
  misc_feature 1..12: note = synthetic [barcode part2]
  source 1..12: mol_type = other DNA
atgtgcgtctct

SEQ ID NO: 45923 - DNA, 12 bp, synthetic construct
  misc_feature 1..12: note = synthetic [barcode part2]
  source 1..12: mol_type = other DNA
tattctcgcgtg

SEQ ID NO: 45924 - DNA, 12 bp, synthetic construct
  misc_feature 1..12: note = synthetic [barcode part2]
  source 1..12: mol_type = other DNA
tgaaccgtgtat

SEQ ID NO: 45925 - DNA, 12 bp, synthetic construct
  misc_feature 1..12: note = synthetic [barcode part2]
  source 1..12: mol_type = other DNA
cggtaactgcgt

SEQ ID NO: 45926 - DNA, 12 bp, synthetic construct
  misc_feature 1..12: note = synthetic [barcode part2]
  source 1..12: mol_type = other DNA
caccatatctcg

SEQ ID NO: 45927 - DNA, 12 bp, synthetic construct
  misc_feature 1..12: note = synthetic [barcode part2]
  source 1..12: mol_type = other DNA
attgccaatacg

SEQ ID NO: 45928 - DNA, 12 bp, synthetic construct
  misc_feature 1..12: note = synthetic [barcode part2]
  source 1..12: mol_type = other DNA
taataactgcgc

SEQ ID NO: 45929 - DNA, 12 bp, synthetic construct
  misc_feature 1..12: note = synthetic [barcode part2]
  source 1..12: mol_type = other DNA
atggcgtgaagt

SEQ ID NO: 45930 - DNA, 12 bp, synthetic construct
  misc_feature 1..12: note = synthetic [barcode part2]
  source 1..12: mol_type = other DNA
cactaacgaccg

SEQ ID NO: 45931 - DNA, 12 bp, synthetic construct
  misc_feature 1..12: note = synthetic [barcode part2]
  source 1..12: mol_type = other DNA
tagtatggccat

SEQ ID NO: 45932 - DNA, 12 bp, synthetic construct
  misc_feature 1..12: note = synthetic [barcode part2]
  source 1..12: mol_type = other DNA
tcgaatcatgtg

SEQ ID NO: 45933 - DNA, 12 bp, synthetic construct
  misc_feature 1..12: note = synthetic [barcode part2]
  source 1..12: mol_type = other DNA
acatggcaatct

SEQ ID NO: 45934 - DNA, 12 bp, synthetic construct
  misc_feature 1..12: note = synthetic [barcode part2]
  source 1..12: mol_type = other DNA
tggattgtgtac

SEQ ID NO: 45935 - DNA, 12 bp, synthetic construct
  misc_feature 1..12: note = synthetic [barcode part2]
  source 1..12: mol_type = other DNA
tggtcaactctc

SEQ ID NO: 45936 - DNA, 12 bp, synthetic construct
  misc_feature 1..12: note = synthetic [barcode part2]
  source 1..12: mol_type = other DNA
ataccgagttac

SEQ ID NO: 45937 - DNA, 12 bp, synthetic construct
  misc_feature 1..12: note = synthetic [barcode part2]
  source 1..12: mol_type = other DNA
tatctggtaacg

SEQ ID NO: 45938 - DNA, 12 bp, synthetic construct
  misc_feature 1..12: note = synthetic [barcode part2]
  source 1..12: mol_type = other DNA
ataaccgagttc

SEQ ID NO: 45939 - DNA, 12 bp, synthetic construct
  misc_feature 1..12: note = synthetic [barcode part2]
  source 1..12: mol_type = other DNA
catcaatgacca

SEQ ID NO: 45940 - DNA, 12 bp, synthetic construct
  misc_feature 1..12: note = synthetic [barcode part2]
  source 1..12: mol_type = other DNA
aaccagcggaat

SEQ ID NO: 45941 - DNA, 12 bp, synthetic construct
  misc_feature 1..12: note = synthetic [barcode part2]
  source 1..12: mol_type = other DNA
cgccggtaatca

SEQ ID NO: 45942 - DNA, 12 bp, synthetic construct
  misc_feature 1..12: note = synthetic [barcode part2]
  source 1..12: mol_type = other DNA
tagaccggtgct

SEQ ID NO: 45943 - DNA, 12 bp, synthetic construct
  misc_feature 1..12: note = synthetic [barcode part2]
  source 1..12: mol_type = other DNA
tccagccaatct

SEQ ID NO: 45944 - DNA, 12 bp, synthetic construct
  misc_feature 1..12: note = synthetic [barcode part2]
  source 1..12: mol_type = other DNA
tatgttaagccg

SEQ ID NO: 45945 - DNA, 12 bp, synthetic construct
  misc_feature 1..12: note = synthetic [barcode part2]
  source 1..12: mol_type = other DNA
tgtggaagtgca

SEQ ID NO: 45946 - DNA, 12 bp, synthetic construct
  misc_feature 1..12: note = synthetic [barcode part2]
  source 1..12: mol_type = other DNA
tcaacatctgga

SEQ ID NO: 45947 - DNA, 12 bp, synthetic construct
  misc_feature 1..12: note = synthetic [barcode part2]
  source 1..12: mol_type = other DNA
tgtggtccaata

SEQ ID NO: 45948 - DNA, 12 bp, synthetic construct
  misc_feature 1..12: note = synthetic [barcode part2]
  source 1..12: mol_type = other DNA
tcactcttggca

SEQ ID NO: 45949 - DNA, 12 bp, synthetic construct
  misc_feature 1..12: note = synthetic [barcode part2]
  source 1..12: mol_type = other DNA
cgcaccggatta

SEQ ID NO: 45950 - DNA, 12 bp, synthetic construct
  misc_feature 1..12: note = synthetic [barcode part2]
  source 1..12: mol_type = other DNA
accatcagcgtg

SEQ ID NO: 45951 - DNA, 12 bp, synthetic construct
  misc_feature 1..12: note = synthetic [barcode part2]
  source 1..12: mol_type = other DNA
tacattgagcca

SEQ ID NO: 45952 - DNA, 12 bp, synthetic construct
  misc_feature 1..12: note = synthetic [barcode part2]
  source 1..12: mol_type = other DNA
tgacatacagct

SEQ ID NO: 45953 - DNA, 12 bp, synthetic construct
  misc_feature 1..12: note = synthetic [barcode part2]
  source 1..12: mol_type = other DNA
ctctaaccagct

SEQ ID NO: 45954 - DNA, 12 bp, synthetic construct
  misc_feature 1..12: note = synthetic [barcode part2]
  source 1..12: mol_type = other DNA
tagcgcaattgt

SEQ ID NO: 45955 - DNA, 12 bp, synthetic construct
  misc_feature 1..12: note = synthetic [barcode part2]
  source 1..12: mol_type = other DNA
tagcggttatgt

SEQ ID NO: 45956 - DNA, 12 bp, synthetic construct
  misc_feature 1..12: note = synthetic [barcode part2]
  source 1..12: mol_type = other DNA
taagccatgcgc

SEQ ID NO: 45957 - DNA, 12 bp, synthetic construct
  misc_feature 1..12: note = synthetic [barcode part2]
  source 1..12: mol_type = other DNA
tgctatgctctg

SEQ ID NO: 45958 - DNA, 12 bp, synthetic construct
  misc_feature 1..12: note = synthetic [barcode part2]
  source 1..12: mol_type = other DNA
ttggaagcggta

SEQ ID NO: 45959 - DNA, 12 bp, synthetic construct
  misc_feature 1..12: note = synthetic [barcode part2]
  source 1..12: mol_type = other DNA
atgaccgctaat

SEQ ID NO: 45960 - DNA, 12 bp, synthetic construct
  misc_feature 1..12: note = synthetic [barcode part2]
  source 1..12: mol_type = other DNA
tgtcacgcttca

SEQ ID NO: 45961 - DNA, 12 bp, synthetic construct
  misc_feature 1..12: note = synthetic [barcode part2]
  source 1..12: mol_type = other DNA
ttggtatctgga

SEQ ID NO: 45962 - DNA, 12 bp, synthetic construct
  misc_feature 1..12: note = synthetic [barcode part2]
  source 1..12: mol_type = other DNA
tctcagcattgc

SEQ ID NO: 45963 - DNA, 12 bp, synthetic construct
  misc_feature 1..12: note = synthetic [barcode part2]
  source 1..12: mol_type = other DNA
tctgattccagc

SEQ ID NO: 45964 - DNA, 12 bp, synthetic construct
  misc_feature 1..12: note = synthetic [barcode part2]
  source 1..12: mol_type = other DNA
ttagcacaactg

SEQ ID NO: 45965 - DNA, 12 bp, synthetic construct
  misc_feature 1..12: note = synthetic [barcode part2]
  source 1..12: mol_type = other DNA
cggattggtgct

SEQ ID NO: 45966 - DNA, 12 bp, synthetic construct
  misc_feature 1..12: note = synthetic [barcode part2]
  source 1..12: mol_type = other DNA
ttgtacaccaga

SEQ ID NO: 45967 - DNA, 12 bp, synthetic construct
  misc_feature 1..12: note = synthetic [barcode part2]
  source 1..12: mol_type = other DNA
tcacgcaccaga

SEQ ID NO: 45968 - DNA, 12 bp, synthetic construct
  misc_feature 1..12: note = synthetic [barcode part2]
  source 1..12: mol_type = other DNA
ttgacgcaatca

SEQ ID NO: 45969 - DNA, 12 bp, synthetic construct
  misc_feature 1..12: note = synthetic [barcode part2]
  source 1..12: mol_type = other DNA
tcatgcgctgga

SEQ ID NO: 45970 - DNA, 12 bp, synthetic construct
  misc_feature 1..12: note = synthetic [barcode part2]
  source 1..12: mol_type = other DNA
ctggtataactg

SEQ ID NO: 45971 - DNA, 12 bp, synthetic construct
  misc_feature 1..12: note = synthetic [barcode part2]
  source 1..12: mol_type = other DNA
ctagtatgacca

SEQ ID NO: 45972 - DNA, 12 bp, synthetic construct
  misc_feature 1..12: note = synthetic [barcode part2]
  source 1..12: mol_type = other DNA
atccacgcggta

SEQ ID NO: 45973 - DNA, 12 bp, synthetic construct
  misc_feature 1..12: note = synthetic [barcode part2]
  source 1..12: mol_type = other DNA
ttcttagccagc

SEQ ID NO: 45974 - DNA, 12 bp, synthetic construct
  misc_feature 1..12: note = synthetic [barcode part2]
  source 1..12: mol_type = other DNA
tcagaccgcgta

SEQ ID NO: 45975 - DNA, 12 bp, synthetic construct
  misc_feature 1..12: note = synthetic [barcode part2]
  source 1..12: mol_type = other DNA
taagtatgctgc

SEQ ID NO: 45976 - DNA, 12 bp, synthetic construct
  misc_feature 1..12: note = synthetic [barcode part2]
  source 1..12: mol_type = other DNA
atccggtgtata

SEQ ID NO: 45977 - DNA, 12 bp, synthetic construct
  misc_feature 1..12: note = synthetic [barcode part2]
  source 1..12: mol_type = other DNA
caagcaccagct

SEQ ID NO: 45978 - DNA, 12 bp, synthetic construct
  misc_feature 1..12: note = synthetic [barcode part2]
  source 1..12: mol_type = other DNA
ctcaactggtct

SEQ ID NO: 45979 - DNA, 12 bp, synthetic construct
  misc_feature 1..12: note = synthetic [barcode part2]
  source 1..12: mol_type = other DNA
tgctagtggctg

SEQ ID NO: 45980 - DNA, 12 bp, synthetic construct
  misc_feature 1..12: note = synthetic [barcode part2]
  source 1..12: mol_type = other DNA
ttcagttccagc

SEQ ID NO: 45981 - DNA, 12 bp, synthetic construct
  misc_feature 1..12: note = synthetic [barcode part2]
  source 1..12: mol_type = other DNA
tgagctggcact

SEQ ID NO: 45982 - DNA, 12 bp, synthetic construct
  misc_feature 1..12: note = synthetic [barcode part2]
  source 1..12: mol_type = other DNA
ttgtatggacca

SEQ ID NO: 45983 - DNA, 12 bp, synthetic construct
  misc_feature 1..12: note = synthetic [barcode part2]
  source 1..12: mol_type = other DNA
ttgagccgcgta

SEQ ID NO: 45984 - DNA, 12 bp, synthetic construct
  misc_feature 1..12: note = synthetic [barcode part2]
  source 1..12: mol_type = other DNA
ttgcagctctca

SEQ ID NO: 45985 - DNA, 12 bp, synthetic construct
  misc_feature 1..12: note = synthetic [barcode part2]
  source 1..12: mol_type = other DNA
taagcacaccgc

SEQ ID NO: 45986 - DNA, 12 bp, synthetic construct
  misc_feature 1..12: note = synthetic [barcode part2]
  source 1..12: mol_type = other DNA
tacgctgttaga

SEQ ID NO: 45987 - DNA, 12 bp, synthetic construct
  misc_feature 1..12: note = synthetic [barcode part2]
  source 1..12: mol_type = other DNA
ctctatggtgct

SEQ ID NO: 45988 - DNA, 12 bp, synthetic construct
  misc_feature 1..12: note = synthetic [barcode part2]
  source 1..12: mol_type = other DNA
catctggtagta

SEQ ID NO: 45989 - DNA, 12 bp, synthetic construct
  misc_feature 1..12: note = synthetic [barcode part2]
  source 1..12: mol_type = other DNA
taagccacatac

SEQ ID NO: 45990 - DNA, 12 bp, synthetic construct
  misc_feature 1..12: note = synthetic [barcode part2]
  source 1..12: mol_type = other DNA
cggtatgtggct

SEQ ID NO: 45991 - DNA, 12 bp, synthetic construct
  misc_feature 1..12: note = synthetic [barcode part2]
  source 1..12: mol_type = other DNA
tgagcgtattgt

SEQ ID NO: 45992 - DNA, 12 bp, synthetic construct
  misc_feature 1..12: note = synthetic [barcode part2]
  source 1..12: mol_type = other DNA
ctacataccaga

SEQ ID NO: 45993 - DNA, 12 bp, synthetic construct
  misc_feature 1..12: note = synthetic [barcode part2]
  source 1..12: mol_type = other DNA
acagccaccagt

SEQ ID NO: 45994 - DNA, 12 bp, synthetic construct
  misc_feature 1..12: note = synthetic [barcode part2]
  source 1..12: mol_type = other DNA
tgtgctggatta

SEQ ID NO: 45995 - DNA, 12 bp, synthetic construct
  misc_feature 1..12: note = synthetic [barcode part2]
  source 1..12: mol_type = other DNA
tggcatagctgc

SEQ ID NO: 45996 - DNA, 12 bp, synthetic construct
  misc_feature 1..12: note = synthetic [barcode part2]
  source 1..12: mol_type = other DNA
catggtccggta

SEQ ID NO: 45997 - DNA, 12 bp, synthetic construct
  misc_feature 1..12: note = synthetic [barcode part2]
  source 1..12: mol_type = other DNA
tgtgccattaga

SEQ ID NO: 45998 - DNA, 12 bp, synthetic construct
  misc_feature 1..12: note = synthetic [barcode part2]
  source 1..12: mol_type = other DNA
ctggttactctg

SEQ ID NO: 45999 - DNA, 12 bp, synthetic construct
  misc_feature 1..12: note = synthetic [barcode part2]
  source 1..12: mol_type = other DNA
tgtggtctggca

SEQ ID NO: 46000 - DNA, 12 bp, synthetic construct
  misc_feature 1..12: note = synthetic [barcode part2]
  source 1..12: mol_type = other DNA
tactagtgacca

SEQ ID NO: 46001 - DNA, 12 bp, synthetic construct
  misc_feature 1..12: note = synthetic [barcode part2]
  source 1..12: mol_type = other DNA
ctagaccgtata

SEQ ID NO: 46002 - DNA, 12 bp, synthetic construct
  misc_feature 1..12: note = synthetic [barcode part2]
  source 1..12: mol_type = other DNA
catgttagacca

SEQ ID NO: 46003 - DNA, 12 bp, synthetic construct
  misc_feature 1..12: note = synthetic [barcode part2]
  source 1..12: mol_type = other DNA
aaccacgctggt

SEQ ID NO: 46004 - DNA, 12 bp, synthetic construct
  misc_feature 1..12: note = synthetic [barcode part2]
  source 1..12: mol_type = other DNA
tgtcagcggcta

SEQ ID NO: 46005 - DNA, 12 bp, synthetic construct
  misc_feature 1..12: note = synthetic [barcode part2]
  source 1..12: mol_type = other DNA
taacagctacac

SEQ ID NO: 46006 - DNA, 12 bp, synthetic construct
  misc_feature 1..12: note = synthetic [barcode part2]
  source 1..12: mol_type = other DNA
tacggtctgata

SEQ ID NO: 46007 - DNA, 12 bp, synthetic construct
  misc_feature 1..12: note = synthetic [barcode part2]
  source 1..12: mol_type = other DNA
tgagctgcgcat

SEQ ID NO: 46008 - DNA, 12 bp, synthetic construct
  misc_feature 1..12: note = synthetic [barcode part2]
  source 1..12: mol_type = other DNA
tatagttcagcg

SEQ ID NO: 46009 - DNA, 12 bp, synthetic construct
  misc_feature 1..12: note = synthetic [barcode part2]
  source 1..12: mol_type = other DNA
cttactaaccgc

SEQ ID NO: 46010 - DNA, 12 bp, synthetic construct
  misc_feature 1..12: note = synthetic [barcode part2]
  source 1..12: mol_type = other DNA
ccggtatagcca

SEQ ID NO: 46011 - DNA, 12 bp, synthetic construct
  misc_feature 1..12: note = synthetic [barcode part2]
  source 1..12: mol_type = other DNA
tacgccagatta

SEQ ID NO: 46012 - DNA, 12 bp, synthetic construct
  misc_feature 1..12: note = synthetic [barcode part2]
  source 1..12: mol_type = other DNA
ctacggtctcta

SEQ ID NO: 46013 - DNA, 12 bp, synthetic construct
  misc_feature 1..12: note = synthetic [barcode part2]
  source 1..12: mol_type = other DNA
ttggccagaaga

SEQ ID NO: 46014 - DNA, 12 bp, synthetic construct
  misc_feature 1..12: note = synthetic [barcode part2]
  source 1..12: mol_type = other DNA
taccagcaacta

SEQ ID NO: 46015 - DNA, 12 bp, synthetic construct
  misc_feature 1..12: note = synthetic [barcode part2]
  source 1..12: mol_type = other DNA
ttgccagcgtga

SEQ ID NO: 46016 - DNA, 12 bp, synthetic construct
  misc_feature 1..12: note = synthetic [barcode part2]
  source 1..12: mol_type = other DNA
taacatagccac

SEQ ID NO: 46017 - DNA, 12 bp, synthetic construct
  misc_feature 1..12: note = synthetic [barcode part2]
  source 1..12: mol_type = other DNA
ataactaccagc

SEQ ID NO: 46018 - DNA, 12 bp, synthetic construct
  misc_feature 1..12: note = synthetic [barcode part2]
  source 1..12: mol_type = other DNA
actattggtgca

SEQ ID NO: 46019 - DNA, 12 bp, synthetic construct
  misc_feature 1..12: note = synthetic [barcode part2]
  source 1..12: mol_type = other DNA
cttataccgtgc

SEQ ID NO: 46020 - DNA, 12 bp, synthetic construct
  misc_feature 1..12: note = synthetic [barcode part2]
  source 1..12: mol_type = other DNA
taccaatggcta

SEQ ID NO: 46021 - DNA, 12 bp, synthetic construct
  misc_feature 1..12: note = synthetic [barcode part2]
  source 1..12: mol_type = other DNA
ttggctgttcca

SEQ ID NO: 46022 - DNA, 12 bp, synthetic construct
  misc_feature 1..12: note = synthetic [barcode part2]
  source 1..12: mol_type = other DNA
tgcttgacagcg

SEQ ID NO: 46023 - DNA, 12 bp, synthetic construct
  misc_feature 1..12: note = synthetic [barcode part2]
  source 1..12: mol_type = other DNA
ctgtacagaccg

SEQ ID NO: 46024 - DNA, 12 bp, synthetic construct
  misc_feature 1..12: note = synthetic [barcode part2]
  source 1..12: mol_type = other DNA
tgctgatgattg

SEQ ID NO: 46025 - DNA, 12 bp, synthetic construct
  misc_feature 1..12: note = synthetic [barcode part2]
  source 1..12: mol_type = other DNA
ttatcaagcgtg

SEQ ID NO: 46026 - DNA, 12 bp, synthetic construct
  misc_feature 1..12: note = synthetic [barcode part2]
  source 1..12: mol_type = other DNA
tatcagcagttg

SEQ ID NO: 46027 - DNA, 12 bp, synthetic construct
  misc_feature 1..12: note = synthetic [barcode part2]
  source 1..12: mol_type = other DNA
tgtaacttggca

SEQ ID NO: 46028 - DNA, 12 bp, synthetic construct
  misc_feature 1..12: note = synthetic [barcode part2]
  source 1..12: mol_type = other DNA
tctacgctacac

SEQ ID NO: 46029 - DNA, 12 bp, synthetic construct
  misc_feature 1..12: note = synthetic [barcode part2]
  source 1..12: mol_type = other DNA
tcatacagacca

SEQ ID NO: 46030 - DNA, 12 bp, synthetic construct
  misc_feature 1..12: note = synthetic [barcode part2]
  source 1..12: mol_type = other DNA
tcaccagtatga

SEQ ID NO: 46031 - DNA, 12 bp, synthetic construct
  misc_feature 1..12: note = synthetic [barcode part2]
  source 1..12: mol_type = other DNA
tcacggtagaga

SEQ ID NO: 46032 - DNA, 12 bp, synthetic construct
  misc_feature 1..12: note = synthetic [barcode part2]
  source 1..12: mol_type = other DNA
ttccagctagtc

SEQ ID NO: 46033 - DNA, 12 bp, synthetic construct
  misc_feature 1..12: note = synthetic [barcode part2]
  source 1..12: mol_type = other DNA
tggacatgctgc

SEQ ID NO: 46034 - DNA, 12 bp, synthetic construct
  misc_feature 1..12: note = synthetic [barcode part2]
  source 1..12: mol_type = other DNA
ccggttagaaga

SEQ ID NO: 46035 - DNA, 12 bp, synthetic construct
  misc_feature 1..12: note = synthetic [barcode part2]
  source 1..12: mol_type = other DNA
tgacagcgtgct

SEQ ID NO: 46036 - DNA, 12 bp, synthetic construct
  misc_feature 1..12: note = synthetic [barcode part2]
  source 1..12: mol_type = other DNA
actgtgccggta

SEQ ID NO: 46037 - DNA, 12 bp, synthetic construct
  misc_feature 1..12: note = synthetic [barcode part2]
  source 1..12: mol_type = other DNA
ttggctgagaga

SEQ ID NO: 46038 - DNA, 12 bp, synthetic construct
  misc_feature 1..12: note = synthetic [barcode part2]
  source 1..12: mol_type = other DNA
tagcagctgtat

SEQ ID NO: 46039 - DNA, 12 bp, synthetic construct
  misc_feature 1..12: note = synthetic [barcode part2]
  source 1..12: mol_type = other DNA
caacggtacgct

SEQ ID NO: 46040 - DNA, 12 bp, synthetic construct
  misc_feature 1..12: note = synthetic [barcode part2]
  source 1..12: mol_type = other DNA
tgtcttcacgca

SEQ ID NO: 46041 - DNA, 12 bp, synthetic construct
  misc_feature 1..12: note = synthetic [barcode part2]
  source 1..12: mol_type = other DNA
taccgtgagaga

SEQ ID NO: 46042 - DNA, 12 bp, synthetic construct
  misc_feature 1..12: note = synthetic [barcode part2]
  source 1..12: mol_type = other DNA
tggcagcatgtc

SEQ ID NO: 46043 - DNA, 12 bp, synthetic construct
  misc_feature 1..12: note = synthetic [barcode part2]
  source 1..12: mol_type = other DNA
tgtgccagacca

SEQ ID NO: 46044 - DNA, 12 bp, synthetic construct
  misc_feature 1..12: note = synthetic [barcode part2]
  source 1..12: mol_type = other DNA
ctatctccggta

SEQ ID NO: 46045 - DNA, 12 bp, synthetic construct
  misc_feature 1..12: note = synthetic [barcode part2]
  source 1..12: mol_type = other DNA
tcaacatggcta

SEQ ID NO: 46046 - DNA, 12 bp, synthetic construct
  misc_feature 1..12: note = synthetic [barcode part2]
  source 1..12: mol_type = other DNA
ttgcacgctgga

SEQ ID NO: 46047 - DNA, 12 bp, synthetic construct
  misc_feature 1..12: note = synthetic [barcode part2]
  source 1..12: mol_type = other DNA
ctaatacggtca

SEQ ID NO: 46048 - DNA, 12 bp, synthetic construct
  misc_feature 1..12: note = synthetic [barcode part2]
  source 1..12: mol_type = other DNA
tcagattgcaca

SEQ ID NO: 46049 - DNA, 12 bp, synthetic construct
  misc_feature 1..12: note = synthetic [barcode part2]
  source 1..12: mol_type = other DNA
tcagcgtagtta

SEQ ID NO: 46050 - DNA, 12 bp, synthetic construct
  misc_feature 1..12: note = synthetic [barcode part2]
  source 1..12: mol_type = other DNA
taacacggctgc

SEQ ID NO: 46051 - DNA, 12 bp, synthetic construct
  misc_feature 1..12: note = synthetic [barcode part2]
  source 1..12: mol_type = other DNA
acggtatagagc

SEQ ID NO: 46052 - DNA, 12 bp, synthetic construct
  misc_feature 1..12: note = synthetic [barcode part2]
  source 1..12: mol_type = other DNA
actcatacggta

SEQ ID NO: 46053 - DNA, 12 bp, synthetic construct
  misc_feature 1..12: note = synthetic [barcode part2]
  source 1..12: mol_type = other DNA
ccgcatagacca

SEQ ID NO: 46054 - DNA, 12 bp, synthetic construct
  misc_feature 1..12: note = synthetic [barcode part2]
  source 1..12: mol_type = other DNA
cttctggttgac

SEQ ID NO: 46055 - DNA, 12 bp, synthetic construct
  misc_feature 1..12: note = synthetic [barcode part2]
  source 1..12: mol_type = other DNA
tgttggcaacta

SEQ ID NO: 46056 - DNA, 12 bp, synthetic construct
  misc_feature 1..12: note = synthetic [barcode part2]
  source 1..12: mol_type = other DNA
acttgcgcggta

SEQ ID NO: 46057 - DNA, 12 bp, synthetic construct
  misc_feature 1..12: note = synthetic [barcode part2]
  source 1..12: mol_type = other DNA
catggtcattga

SEQ ID NO: 46058 - DNA, 12 bp, synthetic construct
  misc_feature 1..12: note = synthetic [barcode part2]
  source 1..12: mol_type = other DNA
tgtctggcagca

SEQ ID NO: 46059 - DNA, 12 bp, synthetic construct
  misc_feature 1..12: note = synthetic [barcode part2]
  source 1..12: mol_type = other DNA
tcacgtgagtta

SEQ ID NO: 46060 - DNA, 12 bp, synthetic construct
  misc_feature 1..12: note = synthetic [barcode part2]
  source 1..12: mol_type = other DNA
ttcagccagttc

SEQ ID NO: 46061 - DNA, 12 bp, synthetic construct
  misc_feature 1..12: note = synthetic [barcode part2]
  source 1..12: mol_type = other DNA
tacattgccaga

SEQ ID NO: 46062 - DNA, 12 bp, synthetic construct
  misc_feature 1..12: note = synthetic [barcode part2]
  source 1..12: mol_type = other DNA
tgttgatctgga

SEQ ID NO: 46063 - DNA, 12 bp, synthetic construct
  misc_feature 1..12: note = synthetic [barcode part2]
  source 1..12: mol_type = other DNA
agttgcgctggt

SEQ ID NO: 46064 - DNA, 12 bp, synthetic construct
  misc_feature 1..12: note = synthetic [barcode part2]
  source 1..12: mol_type = other DNA
ttggtgcggtca

SEQ ID NO: 46065 - DNA, 12 bp, synthetic construct
  misc_feature 1..12: note = synthetic [barcode part2]
  source 1..12: mol_type = other DNA
taagctggtatc

SEQ ID NO: 46066 - DNA, 12 bp, synthetic construct
  misc_feature 1..12: note = synthetic [barcode part2]
  source 1..12: mol_type = other DNA
ttgcgtggatta

SEQ ID NO: 46067 - DNA, 12 bp, synthetic construct
  misc_feature 1..12: note = synthetic [barcode part2]
  source 1..12: mol_type = other DNA
atctgtacggta

SEQ ID NO: 46068 - DNA, 12 bp, synthetic construct
  misc_feature 1..12: note = synthetic [barcode part2]
  source 1..12: mol_type = other DNA
tcatatgagcca

SEQ ID NO: 46069 - DNA, 12 bp, synthetic construct
  misc_feature 1..12: note = synthetic [barcode part2]
  source 1..12: mol_type = other DNA
tggcagctatgc

SEQ ID NO: 46070 - DNA, 12 bp, synthetic construct
  misc_feature 1..12: note = synthetic [barcode part2]
  source 1..12: mol_type = other DNA
atcacgccggta

SEQ ID NO: 46071 - DNA, 12 bp, synthetic construct
  misc_feature 1..12: note = synthetic [barcode part2]
  source 1..12: mol_type = other DNA
tccagagcttct

SEQ ID NO: 46072 - DNA, 12 bp, synthetic construct
  misc_feature 1..12: note = synthetic [barcode part2]
  source 1..12: mol_type = other DNA
aacaccgcttct

SEQ ID NO: 46073 - DNA, 12 bp, synthetic construct
  misc_feature 1..12: note = synthetic [barcode part2]
  source 1..12: mol_type = other DNA
tacaatctggca

SEQ ID NO: 46074 - DNA, 12 bp, synthetic construct
  misc_feature 1..12: note = synthetic [barcode part2]
  source 1..12: mol_type = other DNA
tgtgccaagtta

SEQ ID NO: 46075 - DNA, 12 bp, synthetic construct
  misc_feature 1..12: note = synthetic [barcode part2]
  source 1..12: mol_type = other DNA
tagcatatggct

SEQ ID NO: 46076 - DNA, 12 bp, synthetic construct
  misc_feature 1..12: note = synthetic [barcode part2]
  source 1..12: mol_type = other DNA
tgtgcgtgaaga

SEQ ID NO: 46077 - DNA, 12 bp, synthetic construct
  misc_feature 1..12: note = synthetic [barcode part2]
  source 1..12: mol_type = other DNA
tgtgagagcaca

SEQ ID NO: 46078 - DNA, 12 bp, synthetic construct
  misc_feature 1..12: note = synthetic [barcode part2]
  source 1..12: mol_type = other DNA
taagcacgttac

SEQ ID NO: 46079 - DNA, 12 bp, synthetic construct
  misc_feature 1..12: note = synthetic [barcode part2]
  source 1..12: mol_type = other DNA
tgtgcacagaga

SEQ ID NO: 46080 - DNA, 12 bp, synthetic construct
  misc_feature 1..12: note = synthetic [barcode part2]
  source 1..12: mol_type = other DNA
tagcagcacgct

SEQ ID NO: 46081 - DNA, 12 bp, synthetic construct
  misc_feature 1..12: note = synthetic [barcode part2]
  source 1..12: mol_type = other DNA
tgttgcgtctca

SEQ ID NO: 46082 - DNA, 12 bp, synthetic construct
  misc_feature 1..12: note = synthetic [barcode part2]
  source 1..12: mol_type = other DNA
taccgcagaaga

SEQ ID NO: 46083 - DNA, 12 bp, synthetic construct
  misc_feature 1..12: note = synthetic [barcode part2]
  source 1..12: mol_type = other DNA
actaccgtatga

SEQ ID NO: 46084 - DNA, 12 bp, synthetic construct
  misc_feature 1..12: note = synthetic [barcode part2]
  source 1..12: mol_type = other DNA
tagcgcataact

SEQ ID NO: 46085 - DNA, 12 bp, synthetic construct
  misc_feature 1..12: note = synthetic [barcode part2]
  source 1..12: mol_type = other DNA
ccggtgcttaga

SEQ ID NO: 46086 - DNA, 12 bp, synthetic construct
  misc_feature 1..12: note = synthetic [barcode part2]
  source 1..12: mol_type = other DNA
cgctagtggtca

SEQ ID NO: 46087 - DNA, 12 bp, synthetic construct
  misc_feature 1..12: note = synthetic [barcode part2]
  source 1..12: mol_type = other DNA
ttgaccgcttca

SEQ ID NO: 46088 - DNA, 12 bp, synthetic construct
  misc_feature 1..12: note = synthetic [barcode part2]
  source 1..12: mol_type = other DNA
acacagcggtct

SEQ ID NO: 46089 - DNA, 12 bp, synthetic construct
  misc_feature 1..12: note = synthetic [barcode part2]
  source 1..12: mol_type = other DNA
tatgctgaactg

SEQ ID NO: 46090 - DNA, 12 bp, synthetic construct
  misc_feature 1..12: note = synthetic [barcode part2]
  source 1..12: mol_type = other DNA
actgctggtata

SEQ ID NO: 46091 - DNA, 12 bp, synthetic construct
  misc_feature 1..12: note = synthetic [barcode part2]
  source 1..12: mol_type = other DNA
ttgttccgctga

SEQ ID NO: 46092 - DNA, 12 bp, synthetic construct
  misc_feature 1..12: note = synthetic [barcode part2]
  source 1..12: mol_type = other DNA
ctagaccacgca

SEQ ID NO: 46093 - DNA, 12 bp, synthetic construct
  misc_feature 1..12: note = synthetic [barcode part2]
  source 1..12: mol_type = other DNA
ctagcgtggtca

SEQ ID NO: 46094 - DNA, 12 bp, synthetic construct
  misc_feature 1..12: note = synthetic [barcode part2]
  source 1..12: mol_type = other DNA
taccagcggtca

SEQ ID NO: 46095 - DNA, 12 bp, synthetic construct
  misc_feature 1..12: note = synthetic [barcode part2]
  source 1..12: mol_type = other DNA
actgcaccaata

SEQ ID NO: 46096 - DNA, 12 bp, synthetic construct
  misc_feature 1..12: note = synthetic [barcode part2]
  source 1..12: mol_type = other DNA
ttgcgtgagcca

SEQ ID NO: 46097 - DNA, 12 bp, synthetic construct
  misc_feature 1..12: note = synthetic [barcode part2]
  source 1..12: mol_type = other DNA
tgcggcttagtg

SEQ ID NO: 46098 - DNA, 12 bp, synthetic construct
  misc_feature 1..12: note = synthetic [barcode part2]
  source 1..12: mol_type = other DNA
tactaacagcca

SEQ ID NO: 46099 - DNA, 12 bp, synthetic construct
  misc_feature 1..12: note = synthetic [barcode part2]
  source 1..12: mol_type = other DNA
tagtggcgtgct

SEQ ID NO: 46100 - DNA, 12 bp, synthetic construct
  misc_feature 1..12: note = synthetic [barcode part2]
  source 1..12: mol_type = other DNA
tgtatcaagcca

SEQ ID NO: 46101 - DNA, 12 bp, synthetic construct
  misc_feature 1..12: note = synthetic [barcode part2]
  source 1..12: mol_type = other DNA
taatggctatgc

SEQ ID NO: 46102 - DNA, 12 bp, synthetic construct
  misc_feature 1..12: note = synthetic [barcode part2]
  source 1..12: mol_type = other DNA
caagcgtaccgt

SEQ ID NO: 46103 - DNA, 12 bp, synthetic construct
  misc_feature 1..12: note = synthetic [barcode part2]
  source 1..12: mol_type = other DNA
ttccagcatcac

SEQ ID NO: 46104 - DNA, 12 bp, synthetic construct
  misc_feature 1..12: note = synthetic [barcode part2]
  source 1..12: mol_type = other DNA
ttggtatggcta

SEQ ID NO: 46105 - DNA, 12 bp, synthetic construct
  misc_feature 1..12: note = synthetic [barcode part2]
  source 1..12: mol_type = other DNA
tagcggtgcact

SEQ ID NO: 46106 - DNA, 12 bp, synthetic construct
  misc_feature 1..12: note = synthetic [barcode part2]
  source 1..12: mol_type = other DNA
tgagcacatcat

SEQ ID NO: 46107 - DNA, 12 bp, synthetic construct
  misc_feature 1..12: note = synthetic [barcode part2]
  source 1..12: mol_type = other DNA
tgatgtatggct

SEQ ID NO: 46108 - DNA, 12 bp, synthetic construct
  misc_feature 1..12: note = synthetic [barcode part2]
  source 1..12: mol_type = other DNA
tacgcgtagaga

SEQ ID NO: 46109 - DNA, 12 bp, synthetic construct
  misc_feature 1..12: note = synthetic [barcode part2]
  source 1..12: mol_type = other DNA
taagccaacatc

SEQ ID NO: 46110 - DNA, 12 bp, synthetic construct
  misc_feature 1..12: note = synthetic [barcode part2]
  source 1..12: mol_type = other DNA
ttggcgtccaga

SEQ ID NO: 46111 - DNA, 12 bp, synthetic construct
  misc_feature 1..12: note = synthetic [barcode part2]
  source 1..12: mol_type = other DNA
caagctggtgct

SEQ ID NO: 46112 - DNA, 12 bp, synthetic construct
  misc_feature 1..12: note = synthetic [barcode part2]
  source 1..12: mol_type = other DNA
atcaccgcgtga

SEQ ID NO: 46113 - DNA, 12 bp, synthetic construct
  misc_feature 1..12: note = synthetic [barcode part2]
  source 1..12: mol_type = other DNA
tcagagacggta

SEQ ID NO: 46114 - DNA, 12 bp, synthetic construct
  misc_feature 1..12: note = synthetic [barcode part2]
  source 1..12: mol_type = other DNA
tgtggctcagca

SEQ ID NO: 46115 - DNA, 12 bp, synthetic construct
  misc_feature 1..12: note = synthetic [barcode part2]
  source 1..12: mol_type = other DNA
tgagccatacat

SEQ ID NO: 46116 - DNA, 12 bp, synthetic construct
  misc_feature 1..12: note = synthetic [barcode part2]
  source 1..12: mol_type = other DNA
tacaactcagca

SEQ ID NO: 46117 - DNA, 12 bp, synthetic construct
  misc_feature 1..12: note = synthetic [barcode part2]
  source 1..12: mol_type = other DNA
tatggaagcgtg

SEQ ID NO: 46118 - DNA, 12 bp, synthetic construct
  misc_feature 1..12: note = synthetic [barcode part2]
  source 1..12: mol_type = other DNA
tgacgcagctgt

SEQ ID NO: 46119 - DNA, 12 bp, synthetic construct
  misc_feature 1..12: note = synthetic [barcode part2]
  source 1..12: mol_type = other DNA
ttggcacagtta

SEQ ID NO: 46120 - DNA, 12 bp, synthetic construct
  misc_feature 1..12: note = synthetic [barcode part2]
  source 1..12: mol_type = other DNA
aagcggttaacg

SEQ ID NO: 46121 - DNA, 12 bp, synthetic construct
  misc_feature 1..12: note = synthetic [barcode part2]
  source 1..12: mol_type = other DNA
tgttgcgctcta

SEQ ID NO: 46122 - DNA, 12 bp, synthetic construct
  misc_feature 1..12: note = synthetic [barcode part2]
  source 1..12: mol_type = other DNA
tctggcttcaac

SEQ ID NO: 46123 - DNA, 12 bp, synthetic construct
  misc_feature 1..12: note = synthetic [barcode part2]
  source 1..12: mol_type = other DNA
tagtgtacagct

SEQ ID NO: 46124 - DNA, 12 bp, synthetic construct
  misc_feature 1..12: note = synthetic [barcode part2]
  source 1..12: mol_type = other DNA
ttagctgctctg

SEQ ID NO: 46125 - DNA, 12 bp, synthetic construct
  misc_feature 1..12: note = synthetic [barcode part2]
  source 1..12: mol_type = other DNA
tacgccaagcca

SEQ ID NO: 46126 - DNA, 12 bp, synthetic construct
  misc_feature 1..12: note = synthetic [barcode part2]
  source 1..12: mol_type = other DNA
tactggcaatca

SEQ ID NO: 46127 - DNA, 12 bp, synthetic construct
  misc_feature 1..12: note = synthetic [barcode part2]
  source 1..12: mol_type = other DNA
ttaacgcagccg

SEQ ID NO: 46128 - DNA, 12 bp, synthetic construct
  misc_feature 1..12: note = synthetic [barcode part2]
  source 1..12: mol_type = other DNA
tcagaccataca

SEQ ID NO: 46129 - DNA, 12 bp, synthetic construct
  misc_feature 1..12: note = synthetic [barcode part2]
  source 1..12: mol_type = other DNA
tcaacgcggtca

SEQ ID NO: 46130 - DNA, 12 bp, synthetic construct
  misc_feature 1..12: note = synthetic [barcode part2]
  source 1..12: mol_type = other DNA
acaaccgctggt

SEQ ID NO: 46131 - DNA, 12 bp, synthetic construct
  misc_feature 1..12: note = synthetic [barcode part2]
  source 1..12: mol_type = other DNA
ttgaatcacgca

SEQ ID NO: 46132 - DNA, 12 bp, synthetic construct
  misc_feature 1..12: note = synthetic [barcode part2]
  source 1..12: mol_type = other DNA
tgtgcacttcca

SEQ ID NO: 46133 - DNA, 12 bp, synthetic construct
  misc_feature 1..12: note = synthetic [barcode part2]
  source 1..12: mol_type = other DNA
ttacagcttccg

SEQ ID NO: 46134 - DNA, 12 bp, synthetic construct
  misc_feature 1..12: note = synthetic [barcode part2]
  source 1..12: mol_type = other DNA
tattggcagccg

SEQ ID NO: 46135 - DNA, 12 bp, synthetic construct
  misc_feature 1..12: note = synthetic [barcode part2]
  source 1..12: mol_type = other DNA
ttaagagcagcg

SEQ ID NO: 46136 - DNA, 12 bp, synthetic construct
  misc_feature 1..12: note = synthetic [barcode part2]
  source 1..12: mol_type = other DNA
ttaagccacgcg

SEQ ID NO: 46137 - DNA, 12 bp, synthetic construct
  misc_feature 1..12: note = synthetic [barcode part2]
  source 1..12: mol_type = other DNA
catctaacggta

SEQ ID NO: 46138 - DNA, 12 bp, synthetic construct
  misc_feature 1..12: note = synthetic [barcode part2]
  source 1..12: mol_type = other DNA
ttgttgacgtga

SEQ ID NO: 46139 - DNA, 12 bp, synthetic construct
  misc_feature 1..12: note = synthetic [barcode part2]
  source 1..12: mol_type = other DNA
ttgatgtgacca

SEQ ID NO: 46140 - DNA, 12 bp, synthetic construct
  misc_feature 1..12: note = synthetic [barcode part2]
  source 1..12: mol_type = other DNA
ttagtatagccg

SEQ ID NO: 46141 - DNA, 12 bp, synthetic construct
  misc_feature 1..12: note = synthetic [barcode part2]
  source 1..12: mol_type = other DNA
tctcaatgctgc

SEQ ID NO: 46142 - DNA, 12 bp, synthetic construct
  misc_feature 1..12: note = synthetic [barcode part2]
  source 1..12: mol_type = other DNA
tagtggctgcgt

SEQ ID NO: 46143 - DNA, 12 bp, synthetic construct
  misc_feature 1..12: note = synthetic [barcode part2]
  source 1..12: mol_type = other DNA
tcaatgtagcca

SEQ ID NO: 46144 - DNA, 12 bp, synthetic construct
  misc_feature 1..12: note = synthetic [barcode part2]
  source 1..12: mol_type = other DNA
ttgagccataca

SEQ ID NO: 46145 - DNA, 12 bp, synthetic construct
  misc_feature 1..12: note = synthetic [barcode part2]
  source 1..12: mol_type = other DNA
acggttaccagc

SEQ ID NO: 46146 - DNA, 12 bp, synthetic construct
  misc_feature 1..12: note = synthetic [barcode part2]
  source 1..12: mol_type = other DNA
atccggtacgca

SEQ ID NO: 46147 - DNA, 12 bp, synthetic construct
  misc_feature 1..12: note = synthetic [barcode part2]
  source 1..12: mol_type = other DNA
taccaatctgga

SEQ ID NO: 46148 - DNA, 12 bp, synthetic construct
  misc_feature 1..12: note = synthetic [barcode part2]
  source 1..12: mol_type = other DNA
tgatatggctgt

SEQ ID NO: 46149 - DNA, 12 bp, synthetic construct
  misc_feature 1..12: note = synthetic [barcode part2]
  source 1..12: mol_type = other DNA
ctccggtactat

SEQ ID NO: 46150 - DNA, 12 bp, synthetic construct
  misc_feature 1..12: note = synthetic [barcode part2]
  source 1..12: mol_type = other DNA
aataccggaagc

SEQ ID NO: 46151 - DNA, 12 bp, synthetic construct
  misc_feature 1..12: note = synthetic [barcode part2]
  source 1..12: mol_type = other DNA
actaccggcaca

SEQ ID NO: 46152 - DNA, 12 bp, synthetic construct
  misc_feature 1..12: note = synthetic [barcode part2]
  source 1..12: mol_type = other DNA
tacgttactgga

SEQ ID NO: 46153 - DNA, 12 bp, synthetic construct
  misc_feature 1..12: note = synthetic [barcode part2]
  source 1..12: mol_type = other DNA
tagacgccagct

SEQ ID NO: 46154 - DNA, 12 bp, synthetic construct
  misc_feature 1..12: note = synthetic [barcode part2]
  source 1..12: mol_type = other DNA
tgtgtgctctca

SEQ ID NO: 46155 - DNA, 12 bp, synthetic construct
  misc_feature 1..12: note = synthetic [barcode part2]
  source 1..12: mol_type = other DNA
tgctctcatgtg

SEQ ID NO: 46156 - DNA, 12 bp, synthetic construct
  misc_feature 1..12: note = synthetic [barcode part2]
  source 1..12: mol_type = other DNA
tagactaacgct

SEQ ID NO: 46157 - DNA, 12 bp, synthetic construct
  misc_feature 1..12: note = synthetic [barcode part2]
  source 1..12: mol_type = other DNA
tgagcgtgccat

SEQ ID NO: 46158 - DNA, 12 bp, synthetic construct
  misc_feature 1..12: note = synthetic [barcode part2]
  source 1..12: mol_type = other DNA
ctacacggacca

SEQ ID NO: 46159 - DNA, 12 bp, synthetic construct
  misc_feature 1..12: note = synthetic [barcode part2]
  source 1..12: mol_type = other DNA
tcacgcagatta

SEQ ID NO: 46160 - DNA, 12 bp, synthetic construct
  misc_feature 1..12: note = synthetic [barcode part2]
  source 1..12: mol_type = other DNA
cataccggacca

SEQ ID NO: 46161 - DNA, 12 bp, synthetic construct
  misc_feature 1..12: note = synthetic [barcode part2]
  source 1..12: mol_type = other DNA
tacagagcgtga

SEQ ID NO: 46162 - DNA, 12 bp, synthetic construct
  misc_feature 1..12: note = synthetic [barcode part2]
  source 1..12: mol_type = other DNA
tggtggctacac

SEQ ID NO: 46163 - DNA, 12 bp, synthetic construct
  misc_feature 1..12: note = synthetic [barcode part2]
  source 1..12: mol_type = other DNA
tcacgtggacca

SEQ ID NO: 46164 - DNA, 12 bp, synthetic construct
  misc_feature 1..12: note = synthetic [barcode part2]
  source 1..12: mol_type = other DNA
tcatctctggca

SEQ ID NO: 46165 - DNA, 12 bp, synthetic construct
  misc_feature 1..12: note = synthetic [barcode part2]
  source 1..12: mol_type = other DNA
tactgatggtca

SEQ ID NO: 46166 - DNA, 12 bp, synthetic construct
  misc_feature 1..12: note = synthetic [barcode part2]
  source 1..12: mol_type = other DNA
ttggtgcaacta

SEQ ID NO: 46167 - DNA, 12 bp, synthetic construct
  misc_feature 1..12: note = synthetic [barcode part2]
  source 1..12: mol_type = other DNA
tcagtatggtca

SEQ ID NO: 46168 - DNA, 12 bp, synthetic construct
  misc_feature 1..12: note = synthetic [barcode part2]
  source 1..12: mol_type = other DNA
tcaagccatgta

SEQ ID NO: 46169 - DNA, 12 bp, synthetic construct
  misc_feature 1..12: note = synthetic [barcode part2]
  source 1..12: mol_type = other DNA
tcagctggaaga

SEQ ID NO: 46170 - DNA, 12 bp, synthetic construct
  misc_feature 1..12: note = synthetic [barcode part2]
  source 1..12: mol_type = other DNA
cgcggtctagta

SEQ ID NO: 46171 - DNA, 12 bp, synthetic construct
  misc_feature 1..12: note = synthetic [barcode part2]
  source 1..12: mol_type = other DNA
tccacatgtgct

SEQ ID NO: 46172 - DNA, 12 bp, synthetic construct
  misc_feature 1..12: note = synthetic [barcode part2]
  source 1..12: mol_type = other DNA
tgtattggacca

SEQ ID NO: 46173 - DNA, 12 bp, synthetic construct
  misc_feature 1..12: note = synthetic [barcode part2]
  source 1..12: mol_type = other DNA
tgttagtccaga

SEQ ID NO: 46174 - DNA, 12 bp, synthetic construct
  misc_feature 1..12: note = synthetic [barcode part2]
  source 1..12: mol_type = other DNA
ttctgatgctgc

SEQ ID NO: 46175 - DNA, 12 bp, synthetic construct
  misc_feature 1..12: note = synthetic [barcode part2]
  source 1..12: mol_type = other DNA
taagctgcacgc

SEQ ID NO: 46176 - DNA, 12 bp, synthetic construct
  misc_feature 1..12: note = synthetic [barcode part2]
  source 1..12: mol_type = other DNA
tgttggcggtca

SEQ ID NO: 46177 - DNA, 12 bp, synthetic construct
  misc_feature 1..12: note = synthetic [barcode part2]
  source 1..12: mol_type = other DNA
ttggattgcgta

SEQ ID NO: 46178 - DNA, 12 bp, synthetic construct
  misc_feature 1..12: note = synthetic [barcode part2]
  source 1..12: mol_type = other DNA
taccacgtctca

SEQ ID NO: 46179 - DNA, 12 bp, synthetic construct
  misc_feature 1..12: note = synthetic [barcode part2]
  source 1..12: mol_type = other DNA
tactggcggcta

SEQ ID NO: 46180 - DNA, 12 bp, synthetic construct
  misc_feature 1..12: note = synthetic [barcode part2]
  source 1..12: mol_type = other DNA
tagatacgctgt

SEQ ID NO: 46181 - DNA, 12 bp, synthetic construct
  misc_feature 1..12: note = synthetic [barcode part2]
  source 1..12: mol_type = other DNA
taagcaccaatc

SEQ ID NO: 46182 - DNA, 12 bp, synthetic construct
  misc_feature 1..12: note = synthetic [barcode part2]
  source 1..12: mol_type = other DNA
tgctcaatagtg

SEQ ID NO: 46183 - DNA, 12 bp, synthetic construct
  misc_feature 1..12: note = synthetic [barcode part2]
  source 1..12: mol_type = other DNA
cgcactagacca

SEQ ID NO: 46184 - DNA, 12 bp, synthetic construct
  misc_feature 1..12: note = synthetic [barcode part2]
  source 1..12: mol_type = other DNA
ttgagttgcaca

SEQ ID NO: 46185 - DNA, 12 bp, synthetic construct
  misc_feature 1..12: note = synthetic [barcode part2]
  source 1..12: mol_type = other DNA
ctggaccatacg

SEQ ID NO: 46186 - DNA, 12 bp, synthetic construct
  misc_feature 1..12: note = synthetic [barcode part2]
  source 1..12: mol_type = other DNA
tgcttagtggcg

SEQ ID NO: 46187 - DNA, 12 bp, synthetic construct
  misc_feature 1..12: note = synthetic [barcode part2]
  source 1..12: mol_type = other DNA
ttaatacggctg

SEQ ID NO: 46188 - DNA, 12 bp, synthetic construct
  misc_feature 1..12: note = synthetic [barcode part2]
  source 1..12: mol_type = other DNA
tgaatcagcact

SEQ ID NO: 46189 - DNA, 12 bp, synthetic construct
  misc_feature 1..12: note = synthetic [barcode part2]
  source 1..12: mol_type = other DNA
tggtgtagccac

SEQ ID NO: 46190 - DNA, 12 bp, synthetic construct
  misc_feature 1..12: note = synthetic [barcode part2]
  source 1..12: mol_type = other DNA
tcacgtgttaga

SEQ ID NO: 46191 - DNA, 12 bp, synthetic construct
  misc_feature 1..12: note = synthetic [barcode part2]
  source 1..12: mol_type = other DNA
tgagtattggct

SEQ ID NO: 46192 - DNA, 12 bp, synthetic construct
  misc_feature 1..12: note = synthetic [barcode part2]
  source 1..12: mol_type = other DNA
ttgcgtgccaga

SEQ ID NO: 46193 - DNA, 12 bp, synthetic construct
  misc_feature 1..12: note = synthetic [barcode part2]
  source 1..12: mol_type = other DNA
tgatgatgtgct

SEQ ID NO: 46194 - DNA, 12 bp, synthetic construct
  misc_feature 1..12: note = synthetic [barcode part2]
  source 1..12: mol_type = other DNA
tccatcagccat

SEQ ID NO: 46195 - DNA, 12 bp, synthetic construct
  misc_feature 1..12: note = synthetic [barcode part2]
  source 1..12: mol_type = other DNA
ttgacatggtca

SEQ ID NO: 46196 - DNA, 12 bp, synthetic construct
  misc_feature 1..12: note = synthetic [barcode part2]
  source 1..12: mol_type = other DNA
tgatggctgtat

SEQ ID NO: 46197 - DNA, 12 bp, synthetic construct
  misc_feature 1..12: note = synthetic [barcode part2]
  source 1..12: mol_type = other DNA
tgatggcacgct

SEQ ID NO: 46198 - DNA, 12 bp, synthetic construct
  misc_feature 1..12: note = synthetic [barcode part2]
  source 1..12: mol_type = other DNA
tgagtgccagct

SEQ ID NO: 46199 - DNA, 12 bp, synthetic construct
  misc_feature 1..12: note = synthetic [barcode part2]
  source 1..12: mol_type = other DNA
tagcacgcagct

SEQ ID NO: 46200 - DNA, 12 bp, synthetic construct
  misc_feature 1..12: note = synthetic [barcode part2]
  source 1..12: mol_type = other DNA
tacgctgagtta

SEQ ID NO: 46201 - DNA, 12 bp, synthetic construct
  misc_feature 1..12: note = synthetic [barcode part2]
  source 1..12: mol_type = other DNA
cttatcacggtc

SEQ ID NO: 46202 - DNA, 12 bp, synthetic construct
  misc_feature 1..12: note = synthetic [barcode part2]
  source 1..12: mol_type = other DNA
tccgttacagct

SEQ ID NO: 46203 - DNA, 12 bp, synthetic construct
  misc_feature 1..12: note = synthetic [barcode part2]
  source 1..12: mol_type = other DNA
cggctctctaat

SEQ ID NO: 46204 - DNA, 12 bp, synthetic construct
  misc_feature 1..12: note = synthetic [barcode part2]
  source 1..12: mol_type = other DNA
tccgctgtaact

SEQ ID NO: 46205 - DNA, 12 bp, synthetic construct
  misc_feature 1..12: note = synthetic [barcode part2]
  source 1..12: mol_type = other DNA
tgttagtagcca

SEQ ID NO: 46206 - DNA, 12 bp, synthetic construct
  misc_feature 1..12: note = synthetic [barcode part2]
  source 1..12: mol_type = other DNA
ccgtacactgga

SEQ ID NO: 46207 - DNA, 12 bp, synthetic construct
  misc_feature 1..12: note = synthetic [barcode part2]
  source 1..12: mol_type = other DNA
cttggtcttagc

SEQ ID NO: 46208 - DNA, 12 bp, synthetic construct
  misc_feature 1..12: note = synthetic [barcode part2]
  source 1..12: mol_type = other DNA
tcaagttgcgta

SEQ ID NO: 46209 - DNA, 12 bp, synthetic construct
  misc_feature 1..12: note = synthetic [barcode part2]
  source 1..12: mol_type = other DNA
tggcttcaactc

SEQ ID NO: 46210 - DNA, 12 bp, synthetic construct
  misc_feature 1..12: note = synthetic [barcode part2]
  source 1..12: mol_type = other DNA
agcagttgtatc

SEQ ID NO: 46211 - DNA, 12 bp, synthetic construct
  misc_feature 1..12: note = synthetic [barcode part2]
  source 1..12: mol_type = other DNA
accgctgatacg

SEQ ID NO: 46212 - DNA, 12 bp, synthetic construct
  misc_feature 1..12: note = synthetic [barcode part2]
  source 1..12: mol_type = other DNA
aagcataacgcg

SEQ ID NO: 46213 - DNA, 12 bp, synthetic construct
  misc_feature 1..12: note = synthetic [barcode part2]
  source 1..12: mol_type = other DNA
tctgctggttac

SEQ ID NO: 46214 - DNA, 12 bp, synthetic construct
  misc_feature 1..12: note = synthetic [barcode part2]
  source 1..12: mol_type = other DNA
caagcgttggct

SEQ ID NO: 46215 - DNA, 12 bp, synthetic construct
  misc_feature 1..12: note = synthetic [barcode part2]
  source 1..12: mol_type = other DNA
tattaacggctg

SEQ ID NO: 46216 - DNA, 12 bp, synthetic construct
  misc_feature 1..12: note = synthetic [barcode part2]
  source 1..12: mol_type = other DNA
atacagcttgac

SEQ ID NO: 46217 - DNA, 12 bp, synthetic construct
  misc_feature 1..12: note = synthetic [barcode part2]
  source 1..12: mol_type = other DNA
atctagtgtgca

SEQ ID NO: 46218 - DNA, 12 bp, synthetic construct
  misc_feature 1..12: note = synthetic [barcode part2]
  source 1..12: mol_type = other DNA
aacaatcacgct

SEQ ID NO: 46219 - DNA, 12 bp, synthetic construct
  misc_feature 1..12: note = synthetic [barcode part2]
  source 1..12: mol_type = other DNA
cgtcagcaactg

SEQ ID NO: 46220 - DNA, 12 bp, synthetic construct
  misc_feature 1..12: note = synthetic [barcode part2]
  source 1..12: mol_type = other DNA
aagccagaactg

SEQ ID NO: 46221 - DNA, 12 bp, synthetic construct
  misc_feature 1..12: note = synthetic [barcode part2]
  source 1..12: mol_type = other DNA
agagcacatgtg

SEQ ID NO: 46222 - DNA, 12 bp, synthetic construct
  misc_feature 1..12: note = synthetic [barcode part2]
  source 1..12: mol_type = other DNA
ctgagttgcgtg

SEQ ID NO: 46223 - DNA, 12 bp, synthetic construct
  misc_feature 1..12: note = synthetic [barcode part2]
  source 1..12: mol_type = other DNA
tccattggctgt

SEQ ID NO: 46224 - DNA, 12 bp, synthetic construct
  misc_feature 1..12: note = synthetic [barcode part2]
  source 1..12: mol_type = other DNA
cacatcaagccg

SEQ ID NO: 46225 - DNA, 12 bp, synthetic construct
  misc_feature 1..12: note = synthetic [barcode part2]
  source 1..12: mol_type = other DNA
agcgtatagttc

SEQ ID NO: 46226 - DNA, 12 bp, synthetic construct
  misc_feature 1..12: note = synthetic [barcode part2]
  source 1..12: mol_type = other DNA
tcttgtagcgtc

SEQ ID NO: 46227 - DNA, 12 bp, synthetic construct
  misc_feature 1..12: note = synthetic [barcode part2]
  source 1..12: mol_type = other DNA
tacacgctctca

SEQ ID NO: 46228 - DNA, 12 bp, synthetic construct
  misc_feature 1..12: note = synthetic [barcode part2]
  source 1..12: mol_type = other DNA
catgtgcagaga

SEQ ID NO: 46229 - DNA, 12 bp, synthetic construct
  misc_feature 1..12: note = synthetic [barcode part2]
  source 1..12: mol_type = other DNA
tgacagctgcgt

SEQ ID NO: 46230 - DNA, 12 bp, synthetic construct
  misc_feature 1..12: note = synthetic [barcode part2]
  source 1..12: mol_type = other DNA
aatctctgctgc

SEQ ID NO: 46231 - DNA, 12 bp, synthetic construct
  misc_feature 1..12: note = synthetic [barcode part2]
  source 1..12: mol_type = other DNA
aatggcttacac

SEQ ID NO: 46232 - DNA, 12 bp, synthetic construct
  misc_feature 1..12: note = synthetic [barcode part2]
  source 1..12: mol_type = other DNA
tccacgctgtat

SEQ ID NO: 46233 - DNA, 12 bp, synthetic construct
  misc_feature 1..12: note = synthetic [barcode part2]
  source 1..12: mol_type = other DNA
cttaccgtgatc

SEQ ID NO: 46234 - DNA, 12 bp, synthetic construct
  misc_feature 1..12: note = synthetic [barcode part2]
  source 1..12: mol_type = other DNA
ctgattgttccg

SEQ ID NO: 46235 - DNA, 12 bp, synthetic construct
  misc_feature 1..12: note = synthetic [barcode part2]
  source 1..12: mol_type = other DNA
tatacgcttccg

SEQ ID NO: 46236 - DNA, 12 bp, synthetic construct
  misc_feature 1..12: note = synthetic [barcode part2]
  source 1..12: mol_type = other DNA
ctaagagtggca

SEQ ID NO: 46237 - DNA, 12 bp, synthetic construct
  misc_feature 1..12: note = synthetic [barcode part2]
  source 1..12: mol_type = other DNA
taacagcgcgtc

SEQ ID NO: 46238 - DNA, 12 bp, synthetic construct
  misc_feature 1..12: note = synthetic [barcode part2]
  source 1..12: mol_type = other DNA
acagcgtagagt

SEQ ID NO: 46239 - DNA, 12 bp, synthetic construct
  misc_feature 1..12: note = synthetic [barcode part2]
  source 1..12: mol_type = other DNA
cgctaacaatca

SEQ ID NO: 46240 - DNA, 12 bp, synthetic construct
  misc_feature 1..12: note = synthetic [barcode part2]
  source 1..12: mol_type = other DNA
tacttgacggta

SEQ ID NO: 46241 - DNA, 12 bp, synthetic construct
  misc_feature 1..12: note = synthetic [barcode part2]
  source 1..12: mol_type = other DNA
actgaccagaga

SEQ ID NO: 46242 - DNA, 12 bp, synthetic construct
  misc_feature 1..12: note = synthetic [barcode part2]
  source 1..12: mol_type = other DNA
tagcaatgtgct

SEQ ID NO: 46243 - DNA, 12 bp, synthetic construct
  misc_feature 1..12: note = synthetic [barcode part2]
  source 1..12: mol_type = other DNA
cgctctcataca

SEQ ID NO: 46244 - DNA, 12 bp, synthetic construct
  misc_feature 1..12: note = synthetic [barcode part2]
  source 1..12: mol_type = other DNA
cgcttgatggca

SEQ ID NO: 46245 - DNA, 12 bp, synthetic construct
  misc_feature 1..12: note = synthetic [barcode part2]
  source 1..12: mol_type = other DNA
ttactaagcacg

SEQ ID NO: 46246 - DNA, 12 bp, synthetic construct
  misc_feature 1..12: note = synthetic [barcode part2]
  source 1..12: mol_type = other DNA
tcaacgcaacta

SEQ ID NO: 46247 - DNA, 12 bp, synthetic construct
  misc_feature 1..12: note = synthetic [barcode part2]
  source 1..12: mol_type = other DNA
ttggaccatgta

SEQ ID NO: 46248 - DNA, 12 bp, synthetic construct
  misc_feature 1..12: note = synthetic [barcode part2]
  source 1..12: mol_type = other DNA
ttccatagcgtc

SEQ ID NO: 46249 - DNA, 12 bp, synthetic construct
  misc_feature 1..12: note = synthetic [barcode part2]
  source 1..12: mol_type = other DNA
aatggaagctgc

SEQ ID NO: 46250 - DNA, 12 bp, synthetic construct
  misc_feature 1..12: note = synthetic [barcode part2]
  source 1..12: mol_type = other DNA
ctagattgtgca

SEQ ID NO: 46251 - DNA, 12 bp, synthetic construct
  misc_feature 1..12: note = synthetic [barcode part2]
  source 1..12: mol_type = other DNA
cttgcgttacac

SEQ ID NO: 46252 - DNA, 12 bp, synthetic construct
  misc_feature 1..12: note = synthetic [barcode part2]
  source 1..12: mol_type = other DNA
ctagtgcagcca

SEQ ID NO: 46253 - DNA, 12 bp, synthetic construct
  misc_feature 1..12: note = synthetic [barcode part2]
  source 1..12: mol_type = other DNA
tgaacgctggct

SEQ ID NO: 46254 - DNA, 12 bp, synthetic construct
  misc_feature 1..12: note = synthetic [barcode part2]
  source 1..12: mol_type = other DNA
ctctagtaccgt

SEQ ID NO: 46255 - DNA, 12 bp, synthetic construct
  misc_feature 1..12: note = synthetic [barcode part2]
  source 1..12: mol_type = other DNA
catggtctaaca

SEQ ID NO: 46256 - DNA, 12 bp, synthetic construct
  misc_feature 1..12: note = synthetic [barcode part2]
  source 1..12: mol_type = other DNA
agcattgctctc

SEQ ID NO: 46257 - DNA, 12 bp, synthetic construct
  misc_feature 1..12: note = synthetic [barcode part2]
  source 1..12: mol_type = other DNA
tccactatggct

SEQ ID NO: 46258 - DNA, 12 bp, synthetic construct
  misc_feature 1..12: note = synthetic [barcode part2]
  source 1..12: mol_type = other DNA
ctgacgcaactg

SEQ ID NO: 46259 - DNA, 12 bp, synthetic construct
  misc_feature 1..12: note = synthetic [barcode part2]
  source 1..12: mol_type = other DNA
ccgcaatgaaga

SEQ ID NO: 46260 - DNA, 12 bp, synthetic construct
  misc_feature 1..12: note = synthetic [barcode part2]
  source 1..12: mol_type = other DNA
acacgtgagagt

SEQ ID NO: 46261 - DNA, 12 bp, synthetic construct
  misc_feature 1..12: note = synthetic [barcode part2]
  source 1..12: mol_type = other DNA
tgcttagcaatg

SEQ ID NO: 46262 - DNA, 12 bp, synthetic construct
  misc_feature 1..12: note = synthetic [barcode part2]
  source 1..12: mol_type = other DNA
cggcttctcaat

SEQ ID NO: 46263 - DNA, 12 bp, synthetic construct
  misc_feature 1..12: note = synthetic [barcode part2]
  source 1..12: mol_type = other DNA
agccaatagagc

SEQ ID NO: 46264 - DNA, 12 bp, synthetic construct
  misc_feature 1..12: note = synthetic [barcode part2]
  source 1..12: mol_type = other DNA
attgctggcacg

SEQ ID NO: 46265 - DNA, 12 bp, synthetic construct
  misc_feature 1..12: note = synthetic [barcode part2]
  source 1..12: mol_type = other DNA
tcacatactgga

SEQ ID NO: 46266 - DNA, 12 bp, synthetic construct
  misc_feature 1..12: note = synthetic [barcode part2]
  source 1..12: mol_type = other DNA
tagcgtggctgt

SEQ ID NO: 46267 - DNA, 12 bp, synthetic construct
  misc_feature 1..12: note = synthetic [barcode part2]
  source 1..12: mol_type = other DNA
atccgcatgata

SEQ ID NO: 46268 - DNA, 12 bp, synthetic construct
  misc_feature 1..12: note = synthetic [barcode part2]
  source 1..12: mol_type = other DNA
tagtgcgtggct

SEQ ID NO: 46269 - DNA, 12 bp, synthetic construct
  misc_feature 1..12: note = synthetic [barcode part2]
  source 1..12: mol_type = other DNA
ctgatacagttg

SEQ ID NO: 46270 - DNA, 12 bp, synthetic construct
  misc_feature 1..12: note = synthetic [barcode part2]
  source 1..12: mol_type = other DNA
ccggtatccaga

SEQ ID NO: 46271 - DNA, 12 bp, synthetic construct
  misc_feature 1..12: note = synthetic [barcode part2]
  source 1..12: mol_type = other DNA
tcattagcgtga

SEQ ID NO: 46272 - DNA, 12 bp, synthetic construct
  misc_feature 1..12: note = synthetic [barcode part2]
  source 1..12: mol_type = other DNA
ccggtatgatta

SEQ ID NO: 46273 - DNA, 12 bp, synthetic construct
  misc_feature 1..12: note = synthetic [barcode part2]
  source 1..12: mol_type = other DNA
atctggcgcgta

SEQ ID NO: 46274 - DNA, 12 bp, synthetic construct
  misc_feature 1..12: note = synthetic [barcode part2]
  source 1..12: mol_type = other DNA
agtaactacgct

SEQ ID NO: 46275 - DNA, 12 bp, synthetic construct
  misc_feature 1..12: note = synthetic [barcode part2]
  source 1..12: mol_type = other DNA
atatctccgcac

SEQ ID NO: 46276 - DNA, 12 bp, synthetic construct
  misc_feature 1..12: note = synthetic [barcode part2]
  source 1..12: mol_type = other DNA
cagcgcatagtc

SEQ ID NO: 46277 - DNA, 12 bp, synthetic construct
  misc_feature 1..12: note = synthetic [barcode part2]
  source 1..12: mol_type = other DNA
taccggtagcca

SEQ ID NO: 46278 - DNA, 12 bp, synthetic construct
  misc_feature 1..12: note = synthetic [barcode part2]
  source 1..12: mol_type = other DNA
acgtagtaactc

SEQ ID NO: 46279 - DNA, 12 bp, synthetic construct
  misc_feature 1..12: note = synthetic [barcode part2]
  source 1..12: mol_type = other DNA
ccacgtggattg

SEQ ID NO: 46280 - DNA, 12 bp, synthetic construct
  misc_feature 1..12: note = synthetic [barcode part2]
  source 1..12: mol_type = other DNA
acttgcgtaaca

SEQ ID NO: 46281 - DNA, 12 bp, synthetic construct
  misc_feature 1..12: note = synthetic [barcode part2]
  source 1..12: mol_type = other DNA
caatgatgcact

SEQ ID NO: 46282 - DNA, 12 bp, synthetic construct
  misc_feature 1..12: note = synthetic [barcode part2]
  source 1..12: mol_type = other DNA
aattgtaccagc

SEQ ID NO: 46283 - DNA, 12 bp, synthetic construct
  misc_feature 1..12: note = synthetic [barcode part2]
  source 1..12: mol_type = other DNA
ctactggtatga

SEQ ID NO: 46284 - DNA, 12 bp, synthetic construct
  misc_feature 1..12: note = synthetic [barcode part2]
  source 1..12: mol_type = other DNA
agtaatctgcgt

SEQ ID NO: 46285 - DNA, 12 bp, synthetic construct
  misc_feature 1..12: note = synthetic [barcode part2]
  source 1..12: mol_type = other DNA
agtaactcacgt

SEQ ID NO: 46286 - DNA, 12 bp, synthetic construct
  misc_feature 1..12: note = synthetic [barcode part2]
  source 1..12: mol_type = other DNA
tggagttgaagc

SEQ ID NO: 46287 - DNA, 12 bp, synthetic construct
  misc_feature 1..12: note = synthetic [barcode part2]
  source 1..12: mol_type = other DNA
agagaagctctg

SEQ ID NO: 46288 - DNA, 12 bp, synthetic construct
  misc_feature 1..12: note = synthetic [barcode part2]
  source 1..12: mol_type = other DNA
ctcttgaccagt

SEQ ID NO: 46289 - DNA, 12 bp, synthetic construct
  misc_feature 1..12: note = synthetic [barcode part2]
  source 1..12: mol_type = other DNA
actgagagacca

SEQ ID NO: 46290 - DNA, 12 bp, synthetic construct
  misc_feature 1..12: note = synthetic [barcode part2]
  source 1..12: mol_type = other DNA
tgtgaccattga

SEQ ID NO: 46291 - DNA, 12 bp, synthetic construct
  misc_feature 1..12: note = synthetic [barcode part2]
  source 1..12: mol_type = other DNA
tactgcgcttca

SEQ ID NO: 46292 - DNA, 12 bp, synthetic construct
  misc_feature 1..12: note = synthetic [barcode part2]
  source 1..12: mol_type = other DNA
atacttccgtgc

SEQ ID NO: 46293 - DNA, 12 bp, synthetic construct
  misc_feature 1..12: note = synthetic [barcode part2]
  source 1..12: mol_type = other DNA
acggagagtatc

SEQ ID NO: 46294 - DNA, 12 bp, synthetic construct
  misc_feature 1..12: note = synthetic [barcode part2]
  source 1..12: mol_type = other DNA
acgttccgtatc

SEQ ID NO: 46295 - DNA, 12 bp, synthetic construct
  misc_feature 1..12: note = synthetic [barcode part2]
  source 1..12: mol_type = other DNA
agcttgaacatc

SEQ ID NO: 46296 - DNA, 12 bp, synthetic construct
  misc_feature 1..12: note = synthetic [barcode part2]
  source 1..12: mol_type = other DNA
taatgtagctgc

SEQ ID NO: 46297 - DNA, 12 bp, synthetic construct
  misc_feature 1..12: note = synthetic [barcode part2]
  source 1..12: mol_type = other DNA
cgtatcaagttg

SEQ ID NO: 46298 - DNA, 12 bp, synthetic construct
  misc_feature 1..12: note = synthetic [barcode part2]
  source 1..12: mol_type = other DNA
ccgctaagcaca

SEQ ID NO: 46299 - DNA, 12 bp, synthetic construct
  misc_feature 1..12: note = synthetic [barcode part2]
  source 1..12: mol_type = other DNA
tgcttgatgatg

SEQ ID NO: 46300 - DNA, 12 bp, synthetic construct
  misc_feature 1..12: note = synthetic [barcode part2]
  source 1..12: mol_type = other DNA
cagtatgtagtc

SEQ ID NO: 46301 - DNA, 12 bp, synthetic construct
  misc_feature 1..12: note = synthetic [barcode part2]
  source 1..12: mol_type = other DNA
agtggctgtgct

SEQ ID NO: 46302 - DNA, 12 bp, synthetic construct
  misc_feature 1..12: note = synthetic [barcode part2]
  source 1..12: mol_type = other DNA
tgaatgtgctgt

SEQ ID NO: 46303 - DNA, 12 bp, synthetic construct
  misc_feature 1..12: note = synthetic [barcode part2]
  source 1..12: mol_type = other DNA
tcttggctagtc

SEQ ID NO: 46304 - DNA, 12 bp, synthetic construct
  misc_feature 1..12: note = synthetic [barcode part2]
  source 1..12: mol_type = other DNA
ttgtgtactgga

SEQ ID NO: 46305 - DNA, 12 bp, synthetic construct
  misc_feature 1..12: note = synthetic [barcode part2]
  source 1..12: mol_type = other DNA
tcatcaagtgca

SEQ ID NO: 46306 - DNA, 12 bp, synthetic construct
  misc_feature 1..12: note = synthetic [barcode part2]
  source 1..12: mol_type = other DNA
cggtgtagctgt

SEQ ID NO: 46307 - DNA, 12 bp, synthetic construct
  misc_feature 1..12: note = synthetic [barcode part2]
  source 1..12: mol_type = other DNA
tgtctaatggca

SEQ ID NO: 46308 - DNA, 12 bp, synthetic construct
  misc_feature 1..12: note = synthetic [barcode part2]
  source 1..12: mol_type = other DNA
ttgcttctggca

SEQ ID NO: 46309 - DNA, 12 bp, synthetic construct
  misc_feature 1..12: note = synthetic [barcode part2]
  source 1..12: mol_type = other DNA
ctatggcagaga

SEQ ID NO: 46310 - DNA, 12 bp, synthetic construct
  misc_feature 1..12: note = synthetic [barcode part2]
  source 1..12: mol_type = other DNA
caagttacgtgt

SEQ ID NO: 46311 - DNA, 12 bp, synthetic construct
  misc_feature 1..12: note = synthetic [barcode part2]
  source 1..12: mol_type = other DNA
acactggtggct

SEQ ID NO: 46312 - DNA, 12 bp, synthetic construct
  misc_feature 1..12: note = synthetic [barcode part2]
  source 1..12: mol_type = other DNA
actataccagca

SEQ ID NO: 46313 - DNA, 12 bp, synthetic construct
  misc_feature 1..12: note = synthetic [barcode part2]
  source 1..12: mol_type = other DNA
atagctgctggc

SEQ ID NO: 46314 - DNA, 12 bp, synthetic construct
  misc_feature 1..12: note = synthetic [barcode part2]
  source 1..12: mol_type = other DNA
cagactaacatc

SEQ ID NO: 46315 - DNA, 12 bp, synthetic construct
  misc_feature 1..12: note = synthetic [barcode part2]
  source 1..12: mol_type = other DNA
attgtattggcg

SEQ ID NO: 46316 - DNA, 12 bp, synthetic construct
  misc_feature 1..12: note = synthetic [barcode part2]
  source 1..12: mol_type = other DNA
ctctcaactggt

SEQ ID NO: 46317 - DNA, 12 bp, synthetic construct
  misc_feature 1..12: note = synthetic [barcode part2]
  source 1..12: mol_type = other DNA
tgtggcttgata

SEQ ID NO: 46318 - DNA, 12 bp, synthetic construct
  misc_feature 1..12: note = synthetic [barcode part2]
  source 1..12: mol_type = other DNA
atatcaagctgc

SEQ ID NO: 46319 - DNA, 12 bp, synthetic construct
  misc_feature 1..12: note = synthetic [barcode part2]
  source 1..12: mol_type = other DNA
ccgtgtaagcca

SEQ ID NO: 46320 - DNA, 12 bp, synthetic construct
  misc_feature 1..12: note = synthetic [barcode part2]
  source 1..12: mol_type = other DNA
ctaaccgttcca

SEQ ID NO: 46321 - DNA, 12 bp, synthetic construct
  misc_feature 1..12: note = synthetic [barcode part2]
  source 1..12: mol_type = other DNA
cagcacggttac

SEQ ID NO: 46322 - DNA, 12 bp, synthetic construct
  misc_feature 1..12: note = synthetic [barcode part2]
  source 1..12: mol_type = other DNA
aacaacttgcgt

SEQ ID NO: 46323 - DNA, 12 bp, synthetic construct
  misc_feature 1..12: note = synthetic [barcode part2]
  source 1..12: mol_type = other DNA
ctaacgcagtta

SEQ ID NO: 46324 - DNA, 12 bp, synthetic construct
  misc_feature 1..12: note = synthetic [barcode part2]
  source 1..12: mol_type = other DNA
cgtattggattg

SEQ ID NO: 46325 - DNA, 12 bp, synthetic construct
  misc_feature 1..12: note = synthetic [barcode part2]
  source 1..12: mol_type = other DNA
ttgttgagcgta

SEQ ID NO: 46326 - DNA, 12 bp, synthetic construct
  misc_feature 1..12: note = synthetic [barcode part2]
  source 1..12: mol_type = other DNA
cagatcaatgtc

SEQ ID NO: 46327 - DNA, 12 bp, synthetic construct
  misc_feature 1..12: note = synthetic [barcode part2]
  source 1..12: mol_type = other DNA
tgacacgtggct

SEQ ID NO: 46328 - DNA, 12 bp, synthetic construct
  misc_feature 1..12: note = synthetic [barcode part2]
  source 1..12: mol_type = other DNA
cgtattgagccg

SEQ ID NO: 46329 - DNA, 12 bp, synthetic construct
  misc_feature 1..12: note = synthetic [barcode part2]
  source 1..12: mol_type = other DNA
atggagagcact

SEQ ID NO: 46330 - DNA, 12 bp, synthetic construct
  misc_feature 1..12: note = synthetic [barcode part2]
  source 1..12: mol_type = other DNA
cagattgcgtgc

SEQ ID NO: 46331 - DNA, 12 bp, synthetic construct
  misc_feature 1..12: note = synthetic [barcode part2]
  source 1..12: mol_type = other DNA
acaacgctctct

SEQ ID NO: 46332 - DNA, 12 bp, synthetic construct
  misc_feature 1..12: note = synthetic [barcode part2]
  source 1..12: mol_type = other DNA
tcaaccgctcta

SEQ ID NO: 46333 - DNA, 12 bp, synthetic construct
  misc_feature 1..12: note = synthetic [barcode part2]
  source 1..12: mol_type = other DNA
agcagccacatc

SEQ ID NO: 46334 - DNA, 12 bp, synthetic construct
  misc_feature 1..12: note = synthetic [barcode part2]
  source 1..12: mol_type = other DNA
aaccagctctct

SEQ ID NO: 46335 - DNA, 12 bp, synthetic construct
  misc_feature 1..12: note = synthetic [barcode part2]
  source 1..12: mol_type = other DNA
tcaaccgtctca

SEQ ID NO: 46336 - DNA, 12 bp, synthetic construct
  misc_feature 1..12: note = synthetic [barcode part2]
  source 1..12: mol_type = other DNA
agcaatccgcac

SEQ ID NO: 46337 - DNA, 12 bp, synthetic construct
  misc_feature 1..12: note = synthetic [barcode part2]
  source 1..12: mol_type = other DNA
catcttccgtga

SEQ ID NO: 46338 - DNA, 12 bp, synthetic construct
  misc_feature 1..12: note = synthetic [barcode part2]
  source 1..12: mol_type = other DNA
tgtgattgctga

SEQ ID NO: 46339 - DNA, 12 bp, synthetic construct
  misc_feature 1..12: note = synthetic [barcode part2]
  source 1..12: mol_type = other DNA
cagcttcttagc

SEQ ID NO: 46340 - DNA, 12 bp, synthetic construct
  misc_feature 1..12: note = synthetic [barcode part2]
  source 1..12: mol_type = other DNA
ccgttgaacgca

SEQ ID NO: 46341 - DNA, 12 bp, synthetic construct
  misc_feature 1..12: note = synthetic [barcode part2]
  source 1..12: mol_type = other DNA
tcaagccgcaca

SEQ ID NO: 46342 - DNA, 12 bp, synthetic construct
  misc_feature 1..12: note = synthetic [barcode part2]
  source 1..12: mol_type = other DNA
acgtcaagccac

SEQ ID NO: 46343 - DNA, 12 bp, synthetic construct
  misc_feature 1..12: note = synthetic [barcode part2]
  source 1..12: mol_type = other DNA
tgtgctgagcca

SEQ ID NO: 46344 - DNA, 12 bp, synthetic construct
  misc_feature 1..12: note = synthetic [barcode part2]
  source 1..12: mol_type = other DNA
tactctcacgca

SEQ ID NO: 46345 - DNA, 12 bp, synthetic construct
  misc_feature 1..12: note = synthetic [barcode part2]
  source 1..12: mol_type = other DNA
cggactatacat

SEQ ID NO: 46346 - DNA, 12 bp, synthetic construct
  misc_feature 1..12: note = synthetic [barcode part2]
  source 1..12: mol_type = other DNA
cggatcaacgct

SEQ ID NO: 46347 - DNA, 12 bp, synthetic construct
  misc_feature 1..12: note = synthetic [barcode part2]
  source 1..12: mol_type = other DNA
cggcgcagttat

SEQ ID NO: 46348 - DNA, 12 bp, synthetic construct
  misc_feature 1..12: note = synthetic [barcode part2]
  source 1..12: mol_type = other DNA
acggagatgtac

SEQ ID NO: 46349 - DNA, 12 bp, synthetic construct
  misc_feature 1..12: note = synthetic [barcode part2]
  source 1..12: mol_type = other DNA
agctgcggattc

SEQ ID NO: 46350 - DNA, 12 bp, synthetic construct
  misc_feature 1..12: note = synthetic [barcode part2]
  source 1..12: mol_type = other DNA
acttacacagca

SEQ ID NO: 46351 - DNA, 12 bp, synthetic construct
  misc_feature 1..12: note = synthetic [barcode part2]
  source 1..12: mol_type = other DNA
ctgatgtgattg

SEQ ID NO: 46352 - DNA, 12 bp, synthetic construct
  misc_feature 1..12: note = synthetic [barcode part2]
  source 1..12: mol_type = other DNA
tctgttagctgc

SEQ ID NO: 46353 - DNA, 12 bp, synthetic construct
  misc_feature 1..12: note = synthetic [barcode part2]
  source 1..12: mol_type = other DNA
ctatatgctgga

SEQ ID NO: 46354 - DNA, 12 bp, synthetic construct
  misc_feature 1..12: note = synthetic [barcode part2]
  source 1..12: mol_type = other DNA
acgtaactcaac

SEQ ID NO: 46355 - DNA, 12 bp, synthetic construct
  misc_feature 1..12: note = synthetic [barcode part2]
  source 1..12: mol_type = other DNA
cacttagcggtg

SEQ ID NO: 46356 - DNA, 12 bp, synthetic construct
  misc_feature 1..12: note = synthetic [barcode part2]
  source 1..12: mol_type = other DNA
agacgcaatgtg

SEQ ID NO: 46357 - DNA, 12 bp, synthetic construct
  misc_feature 1..12: note = synthetic [barcode part2]
  source 1..12: mol_type = other DNA
actctctggtca

SEQ ID NO: 46358 - DNA, 12 bp, synthetic construct
  misc_feature 1..12: note = synthetic [barcode part2]
  source 1..12: mol_type = other DNA
tatccagcaatg

SEQ ID NO: 46359 - DNA, 12 bp, synthetic construct
  misc_feature 1..12: note = synthetic [barcode part2]
  source 1..12: mol_type = other DNA
actggtctctca

SEQ ID NO: 46360 - DNA, 12 bp, synthetic construct
  misc_feature 1..12: note = synthetic [barcode part2]
  source 1..12: mol_type = other DNA
ccggaccacata

SEQ ID NO: 46361 - DNA, 12 bp, synthetic construct
  misc_feature 1..12: note = synthetic [barcode part2]
  source 1..12: mol_type = other DNA
agtggaatggct

SEQ ID NO: 46362 - DNA, 12 bp, synthetic construct
  misc_feature 1..12: note = synthetic [barcode part2]
  source 1..12: mol_type = other DNA
atctgatgcaca

SEQ ID NO: 46363 - DNA, 12 bp, synthetic construct
  misc_feature 1..12: note = synthetic [barcode part2]
  source 1..12: mol_type = other DNA
ccatacaagccg

SEQ ID NO: 46364 - DNA, 12 bp, synthetic construct
  misc_feature 1..12: note = synthetic [barcode part2]
  source 1..12: mol_type = other DNA
ctaccagacata

SEQ ID NO: 46365 - DNA, 12 bp, synthetic construct
  misc_feature 1..12: note = synthetic [barcode part2]
  source 1..12: mol_type = other DNA
ccaacataactg

SEQ ID NO: 46366 - DNA, 12 bp, synthetic construct
  misc_feature 1..12: note = synthetic [barcode part2]
  source 1..12: mol_type = other DNA
agtatgtccagt

SEQ ID NO: 46367 - DNA, 12 bp, synthetic construct
  misc_feature 1..12: note = synthetic [barcode part2]
  source 1..12: mol_type = other DNA
cactaacagttg

SEQ ID NO: 46368 - DNA, 12 bp, synthetic construct
  misc_feature 1..12: note = synthetic [barcode part2]
  source 1..12: mol_type = other DNA
ccgtgcgttaga

SEQ ID NO: 46369 - DNA, 12 bp, synthetic construct
  misc_feature 1..12: note = synthetic [barcode part2]
  source 1..12: mol_type = other DNA
taccgtgttcca

SEQ ID NO: 46370 - DNA, 12 bp, synthetic construct
  misc_feature 1..12: note = synthetic [barcode part2]
  source 1..12: mol_type = other DNA
ttgcgcattaga

SEQ ID NO: 46371 - DNA, 12 bp, synthetic construct
  misc_feature 1..12: note = synthetic [barcode part2]
  source 1..12: mol_type = other DNA
cggtggctatgt

SEQ ID NO: 46372 - DNA, 12 bp, synthetic construct
  misc_feature 1..12: note = synthetic [barcode part2]
  source 1..12: mol_type = other DNA
accacgctgatg

SEQ ID NO: 46373 - DNA, 12 bp, synthetic construct
  misc_feature 1..12: note = synthetic [barcode part2]
  source 1..12: mol_type = other DNA
tctgctgcaatc

SEQ ID NO: 46374 - DNA, 12 bp, synthetic construct
  misc_feature 1..12: note = synthetic [barcode part2]
  source 1..12: mol_type = other DNA
agccatattgac

SEQ ID NO: 46375 - DNA, 12 bp, synthetic construct
  misc_feature 1..12: note = synthetic [barcode part2]
  source 1..12: mol_type = other DNA
aatgctgctctc

SEQ ID NO: 46376 - DNA, 12 bp, synthetic construct
  misc_feature 1..12: note = synthetic [barcode part2]
  source 1..12: mol_type = other DNA
agacaatcagcg

SEQ ID NO: 46377 - DNA, 12 bp, synthetic construct
  misc_feature 1..12: note = synthetic [barcode part2]
  source 1..12: mol_type = other DNA
cgccaatagcca

SEQ ID NO: 46378 - DNA, 12 bp, synthetic construct
  misc_feature 1..12: note = synthetic [barcode part2]
  source 1..12: mol_type = other DNA
cttgtgccatac

SEQ ID NO: 46379 - DNA, 12 bp, synthetic construct
  misc_feature 1..12: note = synthetic [barcode part2]
  source 1..12: mol_type = other DNA
ctagccactcta

SEQ ID NO: 46380 - DNA, 12 bp, synthetic construct
  misc_feature 1..12: note = synthetic [barcode part2]
  source 1..12: mol_type = other DNA
ttgctaagtgca

SEQ ID NO: 46381 - DNA, 12 bp, synthetic construct
  misc_feature 1..12: note = synthetic [barcode part2]
  source 1..12: mol_type = other DNA
agctctcattgc

SEQ ID NO: 46382 - DNA, 12 bp, synthetic construct
  misc_feature 1..12: note = synthetic [barcode part2]
  source 1..12: mol_type = other DNA
ccatgatctctg

SEQ ID NO: 46383 - DNA, 12 bp, synthetic construct
  misc_feature 1..12: note = synthetic [barcode part2]
  source 1..12: mol_type = other DNA
tgaagccggaat

SEQ ID NO: 46384 - DNA, 12 bp, synthetic construct
  misc_feature 1..12: note = synthetic [barcode part2]
  source 1..12: mol_type = other DNA
tagtacagctgt

SEQ ID NO: 46385 - DNA, 12 bp, synthetic construct
  misc_feature 1..12: note = synthetic [barcode part2]
  source 1..12: mol_type = other DNA
cttgtatcacgc

SEQ ID NO: 46386 - DNA, 12 bp, synthetic construct
  misc_feature 1..12: note = synthetic [barcode part2]
  source 1..12: mol_type = other DNA
aacgccagaagt

SEQ ID NO: 46387 - DNA, 12 bp, synthetic construct
  misc_feature 1..12: note = synthetic [barcode part2]
  source 1..12: mol_type = other DNA
attattggcgtg

SEQ ID NO: 46388 - DNA, 12 bp, synthetic construct
  misc_feature 1..12: note = synthetic [barcode part2]
  source 1..12: mol_type = other DNA
agcgcgtctaac

SEQ ID NO: 46389 - DNA, 12 bp, synthetic construct
  misc_feature 1..12: note = synthetic [barcode part2]
  source 1..12: mol_type = other DNA
ctgttagatacg

SEQ ID NO: 46390 - DNA, 12 bp, synthetic construct
  misc_feature 1..12: note = synthetic [barcode part2]
  source 1..12: mol_type = other DNA
tcatatgccaga

SEQ ID NO: 46391 - DNA, 12 bp, synthetic construct
  misc_feature 1..12: note = synthetic [barcode part2]
  source 1..12: mol_type = other DNA
aacacgcaatct

SEQ ID NO: 46392 - DNA, 12 bp, synthetic construct
  misc_feature 1..12: note = synthetic [barcode part2]
  source 1..12: mol_type = other DNA
tgaactagtgct

SEQ ID NO: 46393 - DNA, 12 bp, synthetic construct
  misc_feature 1..12: note = synthetic [barcode part2]
  source 1..12: mol_type = other DNA
acgccagcaatc

SEQ ID NO: 46394 - DNA, 12 bp, synthetic construct
  misc_feature 1..12: note = synthetic [barcode part2]
  source 1..12: mol_type = other DNA
atccagcatgta

SEQ ID NO: 46395 - DNA, 12 bp, synthetic construct
  misc_feature 1..12: note = synthetic [barcode part2]
  source 1..12: mol_type = other DNA
aatccagtgtac

SEQ ID NO: 46396 - DNA, 12 bp, synthetic construct
  misc_feature 1..12: note = synthetic [barcode part2]
  source 1..12: mol_type = other DNA
atatgatccagc

SEQ ID NO: 46397 - DNA, 12 bp, synthetic construct
  misc_feature 1..12: note = synthetic [barcode part2]
  source 1..12: mol_type = other DNA
cagtgattgcgc

SEQ ID NO: 46398 - DNA, 12 bp, synthetic construct
  misc_feature 1..12: note = synthetic [barcode part2]
  source 1..12: mol_type = other DNA
tacatcagacca

SEQ ID NO: 46399 - DNA, 12 bp, synthetic construct
  misc_feature 1..12: note = synthetic [barcode part2]
  source 1..12: mol_type = other DNA
agcgttaagagc

SEQ ID NO: 46400 - DNA, 12 bp, synthetic construct
  misc_feature 1..12: note = synthetic [barcode part2]
  source 1..12: mol_type = other DNA
cgcaatccggta

SEQ ID NO: 46401 - DNA, 12 bp, synthetic construct
  misc_feature 1..12: note = synthetic [barcode part2]
  source 1..12: mol_type = other DNA
attacgctggcg

SEQ ID NO: 46402 - DNA, 12 bp, synthetic construct
  misc_feature 1..12: note = synthetic [barcode part2]
  source 1..12: mol_type = other DNA
taagaagccagc

SEQ ID NO: 46403 - DNA, 12 bp, synthetic construct
  misc_feature 1..12: note = synthetic [barcode part2]
  source 1..12: mol_type = other DNA
ctaagttacgca

SEQ ID NO: 46404 - DNA, 12 bp, synthetic construct
  misc_feature 1..12: note = synthetic [barcode part2]
  source 1..12: mol_type = other DNA
agctaacggaac

SEQ ID NO: 46405 - DNA, 12 bp, synthetic construct
  misc_feature 1..12: note = synthetic [barcode part2]
  source 1..12: mol_type = other DNA
tgtgctgccaga

SEQ ID NO: 46406 - DNA, 12 bp, synthetic construct
  misc_feature 1..12: note = synthetic [barcode part2]
  source 1..12: mol_type = other DNA
caacgcacagct

SEQ ID NO: 46407 - DNA, 12 bp, synthetic construct
  misc_feature 1..12: note = synthetic [barcode part2]
  source 1..12: mol_type = other DNA
tagcagccacgt

SEQ ID NO: 46408 - DNA, 12 bp, synthetic construct
  misc_feature 1..12: note = synthetic [barcode part2]
  source 1..12: mol_type = other DNA
cgctatgcttca

SEQ ID NO: 46409 - DNA, 12 bp, synthetic construct
  misc_feature 1..12: note = synthetic [barcode part2]
  source 1..12: mol_type = other DNA
ttagagacagcg

SEQ ID NO: 46410 - DNA, 12 bp, synthetic construct
  misc_feature 1..12: note = synthetic [barcode part2]
  source 1..12: mol_type = other DNA
cggcaatgcact

SEQ ID NO: 46411 - DNA, 12 bp, synthetic construct
  misc_feature 1..12: note = synthetic [barcode part2]
  source 1..12: mol_type = other DNA
tctactagccac

SEQ ID NO: 46412 - DNA, 12 bp, synthetic construct
  misc_feature 1..12: note = synthetic [barcode part2]
  source 1..12: mol_type = other DNA
tagccagcttct

SEQ ID NO: 46413 - DNA, 12 bp, synthetic construct
  misc_feature 1..12: note = synthetic [barcode part2]
  source 1..12: mol_type = other DNA
ctatgtagacca

SEQ ID NO: 46414 - DNA, 12 bp, synthetic construct
  misc_feature 1..12: note = synthetic [barcode part2]
  source 1..12: mol_type = other DNA
tcaagagcggta

SEQ ID NO: 46415 - DNA, 12 bp, synthetic construct
  misc_feature 1..12: note = synthetic [barcode part2]
  source 1..12: mol_type = other DNA
ttgacgcggcta

SEQ ID NO: 46416 - DNA, 12 bp, synthetic construct
  misc_feature 1..12: note = synthetic [barcode part2]
  source 1..12: mol_type = other DNA
tgatacagccat

SEQ ID NO: 46417 - DNA, 12 bp, synthetic construct
  misc_feature 1..12: note = synthetic [barcode part2]
  source 1..12: mol_type = other DNA
actgccaacata

SEQ ID NO: 46418 - DNA, 12 bp, synthetic construct
  misc_feature 1..12: note = synthetic [barcode part2]
  source 1..12: mol_type = other DNA
tgacagccatat

SEQ ID NO: 46419 - DNA, 12 bp, synthetic construct
  misc_feature 1..12: note = synthetic [barcode part2]
  source 1..12: mol_type = other DNA
agtggcttgcgt

SEQ ID NO: 46420 - DNA, 12 bp, synthetic construct
  misc_feature 1..12: note = synthetic [barcode part2]
  source 1..12: mol_type = other DNA
aacgctggagat

SEQ ID NO: 46421 - DNA, 12 bp, synthetic construct
  misc_feature 1..12: note = synthetic [barcode part2]
  source 1..12: mol_type = other DNA
cggactacgtgt

SEQ ID NO: 46422 - DNA, 12 bp, synthetic construct
  misc_feature 1..12: note = synthetic [barcode part2]
  source 1..12: mol_type = other DNA
ttgaactgtgca

SEQ ID NO: 46423 - DNA, 12 bp, synthetic construct
  misc_feature 1..12: note = synthetic [barcode part2]
  source 1..12: mol_type = other DNA
acggattgttac

SEQ ID NO: 46424 - DNA, 12 bp, synthetic construct
  misc_feature 1..12: note = synthetic [barcode part2]
  source 1..12: mol_type = other DNA
cagtaacgcgtc

SEQ ID NO: 46425 - DNA, 12 bp, synthetic construct
  misc_feature 1..12: note = synthetic [barcode part2]
  source 1..12: mol_type = other DNA
cgcactaagtta

SEQ ID NO: 46426 - DNA, 12 bp, synthetic construct
  misc_feature 1..12: note = synthetic [barcode part2]
  source 1..12: mol_type = other DNA
cggcagcatact

SEQ ID NO: 46427 - DNA, 12 bp, synthetic construct
  misc_feature 1..12: note = synthetic [barcode part2]
  source 1..12: mol_type = other DNA
caatggcatact

SEQ ID NO: 46428 - DNA, 12 bp, synthetic construct
  misc_feature 1..12: note = synthetic [barcode part2]
  source 1..12: mol_type = other DNA
cgcgtatagaga

SEQ ID NO: 46429 - DNA, 12 bp, synthetic construct
  misc_feature 1..12: note = synthetic [barcode part2]
  source 1..12: mol_type = other DNA
agtggctcatat

SEQ ID NO: 46430 - DNA, 12 bp, synthetic construct
  misc_feature 1..12: note = synthetic [barcode part2]
  source 1..12: mol_type = other DNA
tgttcaacagca

SEQ ID NO: 46431 - DNA, 12 bp, synthetic construct
  misc_feature 1..12: note = synthetic [barcode part2]
  source 1..12: mol_type = other DNA
ttagcgtggctg

SEQ ID NO: 46432 - DNA, 12 bp, synthetic construct
  misc_feature 1..12: note = synthetic [barcode part2]
  source 1..12: mol_type = other DNA
tgaagagctggt

SEQ ID NO: 46433 - DNA, 12 bp, synthetic construct
  misc_feature 1..12: note = synthetic [barcode part2]
  source 1..12: mol_type = other DNA
caacagcgcact

SEQ ID NO: 46434 - DNA, 12 bp, synthetic construct
  misc_feature 1..12: note = synthetic [barcode part2]
  source 1..12: mol_type = other DNA
ttggagagctga

SEQ ID NO: 46435 - DNA, 12 bp, synthetic construct
  misc_feature 1..12: note = synthetic [barcode part2]
  source 1..12: mol_type = other DNA
tgagccaatact

SEQ ID NO: 46436 - DNA, 12 bp, synthetic construct
  misc_feature 1..12: note = synthetic [barcode part2]
  source 1..12: mol_type = other DNA
ttggcacttaga

SEQ ID NO: 46437 - DNA, 12 bp, synthetic construct
  misc_feature 1..12: note = synthetic [barcode part2]
  source 1..12: mol_type = other DNA
agcatgttcaac

SEQ ID NO: 46438 - DNA, 12 bp, synthetic construct
  misc_feature 1..12: note = synthetic [barcode part2]
  source 1..12: mol_type = other DNA
cgctagtaacta

SEQ ID NO: 46439 - DNA, 12 bp, synthetic construct
  misc_feature 1..12: note = synthetic [barcode part2]
  source 1..12: mol_type = other DNA
tctgtgctatgc

SEQ ID NO: 46440 - DNA, 12 bp, synthetic construct
  misc_feature 1..12: note = synthetic [barcode part2]
  source 1..12: mol_type = other DNA
acgttgagttac

SEQ ID NO: 46441 - DNA, 12 bp, synthetic construct
  misc_feature 1..12: note = synthetic [barcode part2]
  source 1..12: mol_type = other DNA
tgcttccacatg

SEQ ID NO: 46442 - DNA, 12 bp, synthetic construct
  misc_feature 1..12: note = synthetic [barcode part2]
  source 1..12: mol_type = other DNA
cacttagtaacg

SEQ ID NO: 46443 - DNA, 12 bp, synthetic construct
  misc_feature 1..12: note = synthetic [barcode part2]
  source 1..12: mol_type = other DNA
atcttccagcca

SEQ ID NO: 46444 - DNA, 12 bp, synthetic construct
  misc_feature 1..12: note = synthetic [barcode part2]
  source 1..12: mol_type = other DNA
tgagttaacgct

SEQ ID NO: 46445 - DNA, 12 bp, synthetic construct
  misc_feature 1..12: note = synthetic [barcode part2]
  source 1..12: mol_type = other DNA
aatccagcacgc

SEQ ID NO: 46446 - DNA, 12 bp, synthetic construct
  misc_feature 1..12: note = synthetic [barcode part2]
  source 1..12: mol_type = other DNA
ctaacgcttaga

SEQ ID NO: 46447 - DNA, 12 bp, synthetic construct
  misc_feature 1..12: note = synthetic [barcode part2]
  source 1..12: mol_type = other DNA
ttaagccgtatg

SEQ ID NO: 46448 - DNA, 12 bp, synthetic construct
  misc_feature 1..12: note = synthetic [barcode part2]
  source 1..12: mol_type = other DNA
taagcgtactac

SEQ ID NO: 46449 - DNA, 12 bp, synthetic construct
  misc_feature 1..12: note = synthetic [barcode part2]
  source 1..12: mol_type = other DNA
aagtggccaatg

SEQ ID NO: 46450 - DNA, 12 bp, synthetic construct
  misc_feature 1..12: note = synthetic [barcode part2]
  source 1..12: mol_type = other DNA
tgctgatagccg

SEQ ID NO: 46451 - DNA, 12 bp, synthetic construct
  misc_feature 1..12: note = synthetic [barcode part2]
  source 1..12: mol_type = other DNA
cggtaacgtgct

SEQ ID NO: 46452 - DNA, 12 bp, synthetic construct
  misc_feature 1..12: note = synthetic [barcode part2]
  source 1..12: mol_type = other DNA
tcagcgtgacca

SEQ ID NO: 46453 - DNA, 12 bp, synthetic construct
  misc_feature 1..12: note = synthetic [barcode part2]
  source 1..12: mol_type = other DNA
cgcttgacaata

SEQ ID NO: 46454 - DNA, 12 bp, synthetic construct
  misc_feature 1..12: note = synthetic [barcode part2]
  source 1..12: mol_type = other DNA
tcagcacagcca

SEQ ID NO: 46455 - DNA, 12 bp, synthetic construct
  misc_feature 1..12: note = synthetic [barcode part2]
  source 1..12: mol_type = other DNA
acgttagactac

SEQ ID NO: 46456 - DNA, 12 bp, synthetic construct
  misc_feature 1..12: note = synthetic [barcode part2]
  source 1..12: mol_type = other DNA
ctctgcgtatgt

SEQ ID NO: 46457 - DNA, 12 bp, synthetic construct
  misc_feature 1..12: note = synthetic [barcode part2]
  source 1..12: mol_type = other DNA
cgtccagtaacg

SEQ ID NO: 46458 - DNA, 12 bp, synthetic construct
  misc_feature 1..12: note = synthetic [barcode part2]
  source 1..12: mol_type = other DNA
cacttgatagtg

SEQ ID NO: 46459 - DNA, 12 bp, synthetic construct
  misc_feature 1..12: note = synthetic [barcode part2]
  source 1..12: mol_type = other DNA
ataatcactggc

SEQ ID NO: 46460 - DNA, 12 bp, synthetic construct
  misc_feature 1..12: note = synthetic [barcode part2]
  source 1..12: mol_type = other DNA
tacggcttggca

SEQ ID NO: 46461 - DNA, 12 bp, synthetic construct
  misc_feature 1..12: note = synthetic [barcode part2]
  source 1..12: mol_type = other DNA
tgtatcaccaga

SEQ ID NO: 46462 - DNA, 12 bp, synthetic construct
  misc_feature 1..12: note = synthetic [barcode part2]
  source 1..12: mol_type = other DNA
acaattgccagt

SEQ ID NO: 46463 - DNA, 12 bp, synthetic construct
  misc_feature 1..12: note = synthetic [barcode part2]
  source 1..12: mol_type = other DNA
ttgtacaagcca

SEQ ID NO: 46464 - DNA, 12 bp, synthetic construct
  misc_feature 1..12: note = synthetic [barcode part2]
  source 1..12: mol_type = other DNA
actcacggctga

SEQ ID NO: 46465 - DNA, 12 bp, synthetic construct
  misc_feature 1..12: note = synthetic [barcode part2]
  source 1..12: mol_type = other DNA
aatgcacaactc

SEQ ID NO: 46466 - DNA, 12 bp, synthetic construct
  misc_feature 1..12: note = synthetic [barcode part2]
  source 1..12: mol_type = other DNA
aatacgcttgac

SEQ ID NO: 46467 - DNA, 12 bp, synthetic construct
  misc_feature 1..12: note = synthetic [barcode part2]
  source 1..12: mol_type = other DNA
cgtgtatctctg

SEQ ID NO: 46468 - DNA, 12 bp, synthetic construct
  misc_feature 1..12: note = synthetic [barcode part2]
  source 1..12: mol_type = other DNA
caatatgcagct

SEQ ID NO: 46469 - DNA, 12 bp, synthetic construct
  misc_feature 1..12: note = synthetic [barcode part2]
  source 1..12: mol_type = other DNA
tagtgatacgct

SEQ ID NO: 46470 - DNA, 12 bp, synthetic construct
  misc_feature 1..12: note = synthetic [barcode part2]
  source 1..12: mol_type = other DNA
aagcgtgatgtg

SEQ ID NO: 46471 - DNA, 12 bp, synthetic construct
  misc_feature 1..12: note = synthetic [barcode part2]
  source 1..12: mol_type = other DNA
cacagagatgtg

SEQ ID NO: 46472 - DNA, 12 bp, synthetic construct
  misc_feature 1..12: note = synthetic [barcode part2]
  source 1..12: mol_type = other DNA
cggcataattgt

SEQ ID NO: 46473 - DNA, 12 bp, synthetic construct
  misc_feature 1..12: note = synthetic [barcode part2]
  source 1..12: mol_type = other DNA
tcactggacata

SEQ ID NO: 46474 - DNA, 12 bp, synthetic construct
  misc_feature 1..12: note = synthetic [barcode part2]
  source 1..12: mol_type = other DNA
agcttagtgtac

SEQ ID NO: 46475 - DNA, 12 bp, synthetic construct
  misc_feature 1..12: note = synthetic [barcode part2]
  source 1..12: mol_type = other DNA
tcatggctctca

SEQ ID NO: 46476 - DNA, 12 bp, synthetic construct
  misc_feature 1..12: note = synthetic [barcode part2]
  source 1..12: mol_type = other DNA
catccagcagca

SEQ ID NO: 46477 - DNA, 12 bp, synthetic construct
  misc_feature 1..12: note = synthetic [barcode part2]
  source 1..12: mol_type = other DNA
ccgttgagtata

SEQ ID NO: 46478 - DNA, 12 bp, synthetic construct
  misc_feature 1..12: note = synthetic [barcode part2]
  source 1..12: mol_type = other DNA
ctcatgtgtgct

SEQ ID NO: 46479 - DNA, 12 bp, synthetic construct
  misc_feature 1..12: note = synthetic [barcode part2]
  source 1..12: mol_type = other DNA
tggttgaagagc

SEQ ID NO: 46480 - DNA, 12 bp, synthetic construct
  misc_feature 1..12: note = synthetic [barcode part2]
  source 1..12: mol_type = other DNA
cactgatggctg

SEQ ID NO: 46481 - DNA, 12 bp, synthetic construct
  misc_feature 1..12: note = synthetic [barcode part2]
  source 1..12: mol_type = other DNA
agccataccagc

SEQ ID NO: 46482 - DNA, 12 bp, synthetic construct
  misc_feature 1..12: note = synthetic [barcode part2]
  source 1..12: mol_type = other DNA
atggtgctctct

SEQ ID NO: 46483 - DNA, 12 bp, synthetic construct
  misc_feature 1..12: note = synthetic [barcode part2]
  source 1..12: mol_type = other DNA
ataaccgttagc

SEQ ID NO: 46484 - DNA, 12 bp, synthetic construct
  misc_feature 1..12: note = synthetic [barcode part2]
  source 1..12: mol_type = other DNA
aacgctgagagt

SEQ ID NO: 46485 - DNA, 12 bp, synthetic construct
  misc_feature 1..12: note = synthetic [barcode part2]
  source 1..12: mol_type = other DNA
cttggtcagttc

SEQ ID NO: 46486 - DNA, 12 bp, synthetic construct
  misc_feature 1..12: note = synthetic [barcode part2]
  source 1..12: mol_type = other DNA
ccgctggataca

SEQ ID NO: 46487 - DNA, 12 bp, synthetic construct
  misc_feature 1..12: note = synthetic [barcode part2]
  source 1..12: mol_type = other DNA
ccagattgcgtg

SEQ ID NO: 46488 - DNA, 12 bp, synthetic construct
  misc_feature 1..12: note = synthetic [barcode part2]
  source 1..12: mol_type = other DNA
ccgttagacata

SEQ ID NO: 46489 - DNA, 12 bp, synthetic construct
  misc_feature 1..12: note = synthetic [barcode part2]
  source 1..12: mol_type = other DNA
cgcactattaga

SEQ ID NO: 46490 - DNA, 12 bp, synthetic construct
  misc_feature 1..12: note = synthetic [barcode part2]
  source 1..12: mol_type = other DNA
cacttccatgtg

SEQ ID NO: 46491 - DNA, 12 bp, synthetic construct
  misc_feature 1..12: note = synthetic [barcode part2]
  source 1..12: mol_type = other DNA
agtccagtatgt

SEQ ID NO: 46492 - DNA, 12 bp, synthetic construct
  misc_feature 1..12: note = synthetic [barcode part2]
  source 1..12: mol_type = other DNA
tcacttccagca

SEQ ID NO: 46493 - DNA, 12 bp, synthetic construct
  misc_feature 1..12: note = synthetic [barcode part2]
  source 1..12: mol_type = other DNA
acatgcgcttct

SEQ ID NO: 46494 - DNA, 12 bp, synthetic construct
  misc_feature 1..12: note = synthetic [barcode part2]
  source 1..12: mol_type = other DNA
tacgctggacca

SEQ ID NO: 46495 - DNA, 12 bp, synthetic construct
  misc_feature 1..12: note = synthetic [barcode part2]
  source 1..12: mol_type = other DNA
ccaagccatacg

SEQ ID NO: 46496 - DNA, 12 bp, synthetic construct
  misc_feature 1..12: note = synthetic [barcode part2]
  source 1..12: mol_type = other DNA
cggataccagct

SEQ ID NO: 46497 - DNA, 12 bp, synthetic construct
  misc_feature 1..12: note = synthetic [barcode part2]
  source 1..12: mol_type = other DNA
caacacgtaact

SEQ ID NO: 46498 - DNA, 12 bp, synthetic construct
  misc_feature 1..12: note = synthetic [barcode part2]
  source 1..12: mol_type = other DNA
agagttacagcg

SEQ ID NO: 46499 - DNA, 12 bp, synthetic construct
  misc_feature 1..12: note = synthetic [barcode part2]
  source 1..12: mol_type = other DNA
aatcagcagagc

SEQ ID NO: 46500 - DNA, 12 bp, synthetic construct
  misc_feature 1..12: note = synthetic [barcode part2]
  source 1..12: mol_type = other DNA
agtgattgcact

SEQ ID NO: 46501 - DNA, 12 bp, synthetic construct
  misc_feature 1..12: note = synthetic [barcode part2]
  source 1..12: mol_type = other DNA
tgtagccgctga

SEQ ID NO: 46502 - DNA, 12 bp, synthetic construct
  misc_feature 1..12: note = synthetic [barcode part2]
  source 1..12: mol_type = other DNA
ctcatacacgct

SEQ ID NO: 46503 - DNA, 12 bp, synthetic construct
  misc_feature 1..12: note = synthetic [barcode part2]
  source 1..12: mol_type = other DNA
tcattgagcaca

SEQ ID NO: 46504 - DNA, 12 bp, synthetic construct
  misc_feature 1..12: note = synthetic [barcode part2]
  source 1..12: mol_type = other DNA
agcaatcatgtc

SEQ ID NO: 46505 - DNA, 12 bp, synthetic construct
  misc_feature 1..12: note = synthetic [barcode part2]
  source 1..12: mol_type = other DNA
aattcaagcgtc

SEQ ID NO: 46506 - DNA, 12 bp, synthetic construct
  misc_feature 1..12: note = synthetic [barcode part2]
  source 1..12: mol_type = other DNA
agtggtcacgct

SEQ ID NO: 46507 - DNA, 12 bp, synthetic construct
  misc_feature 1..12: note = synthetic [barcode part2]
  source 1..12: mol_type = other DNA
ctgcttctgatg

SEQ ID NO: 46508 - DNA, 12 bp, synthetic construct
  misc_feature 1..12: note = synthetic [barcode part2]
  source 1..12: mol_type = other DNA
tcaatgtccaga

SEQ ID NO: 46509 - DNA, 12 bp, synthetic construct
  misc_feature 1..12: note = synthetic [barcode part2]
  source 1..12: mol_type = other DNA
cgctgatgacca

SEQ ID NO: 46510 - DNA, 12 bp, synthetic construct
  misc_feature 1..12: note = synthetic [barcode part2]
  source 1..12: mol_type = other DNA
cagtacaattgc

SEQ ID NO: 46511 - DNA, 12 bp, synthetic construct
  misc_feature 1..12: note = synthetic [barcode part2]
  source 1..12: mol_type = other DNA
cgttaacagccg

SEQ ID NO: 46512 - DNA, 12 bp, synthetic construct
  misc_feature 1..12: note = synthetic [barcode part2]
  source 1..12: mol_type = other DNA
cgccatagaaga

SEQ ID NO: 46513 - DNA, 12 bp, synthetic construct
  misc_feature 1..12: note = synthetic [barcode part2]
  source 1..12: mol_type = other DNA
ctcacatgcact

SEQ ID NO: 46514 - DNA, 12 bp, synthetic construct
  misc_feature 1..12: note = synthetic [barcode part2]
  source 1..12: mol_type = other DNA
ccaagttgcacg

SEQ ID NO: 46515 - DNA, 12 bp, synthetic construct
  misc_feature 1..12: note = synthetic [barcode part2]
  source 1..12: mol_type = other DNA
cggagagttagt

SEQ ID NO: 46516 - DNA, 12 bp, synthetic construct
  misc_feature 1..12: note = synthetic [barcode part2]
  source 1..12: mol_type = other DNA
agccgcatcaac

SEQ ID NO: 46517 - DNA, 12 bp, synthetic construct
  misc_feature 1..12: note = synthetic [barcode part2]
  source 1..12: mol_type = other DNA
caatacatggct

SEQ ID NO: 46518 - DNA, 12 bp, synthetic construct
  misc_feature 1..12: note = synthetic [barcode part2]
  source 1..12: mol_type = other DNA
ttggcgtgatta

SEQ ID NO: 46519 - DNA, 12 bp, synthetic construct
  misc_feature 1..12: note = synthetic [barcode part2]
  source 1..12: mol_type = other DNA
tgctggcagttg

SEQ ID NO: 46520 - DNA, 12 bp, synthetic construct
  misc_feature 1..12: note = synthetic [barcode part2]
  source 1..12: mol_type = other DNA
agacatagtgcg

SEQ ID NO: 46521 - DNA, 12 bp, synthetic construct
  misc_feature 1..12: note = synthetic [barcode part2]
  source 1..12: mol_type = other DNA
acagagacgtgt

SEQ ID NO: 46522 - DNA, 12 bp, synthetic construct
  misc_feature 1..12: note = synthetic [barcode part2]
  source 1..12: mol_type = other DNA
acgctggattgc

SEQ ID NO: 46523 - DNA, 12 bp, synthetic construct
  misc_feature 1..12: note = synthetic [barcode part2]
  source 1..12: mol_type = other DNA
acttggcgcaca

SEQ ID NO: 46524 - DNA, 12 bp, synthetic construct
  misc_feature 1..12: note = synthetic [barcode part2]
  source 1..12: mol_type = other DNA
cggcttcaatct

SEQ ID NO: 46525 - DNA, 12 bp, synthetic construct
  misc_feature 1..12: note = synthetic [barcode part2]
  source 1..12: mol_type = other DNA
ccggagatgata

SEQ ID NO: 46526 - DNA, 12 bp, synthetic construct
  misc_feature 1..12: note = synthetic [barcode part2]
  source 1..12: mol_type = other DNA
atggattgctgt

SEQ ID NO: 46527 - DNA, 12 bp, synthetic construct
  misc_feature 1..12: note = synthetic [barcode part2]
  source 1..12: mol_type = other DNA
acacgtggagat

SEQ ID NO: 46528 - DNA, 12 bp, synthetic construct
  misc_feature 1..12: note = synthetic [barcode part2]
  source 1..12: mol_type = other DNA
ctacggttctca

SEQ ID NO: 46529 - DNA, 12 bp, synthetic construct
  misc_feature 1..12: note = synthetic [barcode part2]
  source 1..12: mol_type = other DNA
atactggatcac

SEQ ID NO: 46530 - DNA, 12 bp, synthetic construct
  misc_feature 1..12: note = synthetic [barcode part2]
  source 1..12: mol_type = other DNA
ccactcttgatg

SEQ ID NO: 46531 - DNA, 12 bp, synthetic construct
  misc_feature 1..12: note = synthetic [barcode part2]
  source 1..12: mol_type = other DNA
cttgattggctc

SEQ ID NO: 46532 - DNA, 12 bp, synthetic construct
  misc_feature 1..12: note = synthetic [barcode part2]
  source 1..12: mol_type = other DNA
ttggaccgcaca

SEQ ID NO: 46533 - DNA, 12 bp, synthetic construct
  misc_feature 1..12: note = synthetic [barcode part2]
  source 1..12: mol_type = other DNA
acagaccgctgt

SEQ ID NO: 46534 - DNA, 12 bp, synthetic construct
  misc_feature 1..12: note = synthetic [barcode part2]
  source 1..12: mol_type = other DNA
tacgccaccaga

SEQ ID NO: 46535 - DNA, 12 bp, synthetic construct
  misc_feature 1..12: note = synthetic [barcode part2]
  source 1..12: mol_type = other DNA
tacttccgcgta

SEQ ID NO: 46536 - DNA, 12 bp, synthetic construct
  misc_feature 1..12: note = synthetic [barcode part2]
  source 1..12: mol_type = other DNA
ctagccatctca

SEQ ID NO: 46537 - DNA, 12 bp, synthetic construct
  misc_feature 1..12: note = synthetic [barcode part2]
  source 1..12: mol_type = other DNA
cagtggctgtac

SEQ ID NO: 46538 - DNA, 12 bp, synthetic construct
  misc_feature 1..12: note = synthetic [barcode part2]
  source 1..12: mol_type = other DNA
tccgctgattgt

SEQ ID NO: 46539 - DNA, 12 bp, synthetic construct
  misc_feature 1..12: note = synthetic [barcode part2]
  source 1..12: mol_type = other DNA
atctgcgtagta

SEQ ID NO: 46540 - DNA, 12 bp, synthetic construct
  misc_feature 1..12: note = synthetic [barcode part2]
  source 1..12: mol_type = other DNA
atgctaatggct

SEQ ID NO: 46541 - DNA, 12 bp, synthetic construct
  misc_feature 1..12: note = synthetic [barcode part2]
  source 1..12: mol_type = other DNA
actatgttggca

SEQ ID NO: 46542 - DNA, 12 bp, synthetic construct
  misc_feature 1..12: note = synthetic [barcode part2]
  source 1..12: mol_type = other DNA
taccggtgatta

SEQ ID NO: 46543 - DNA, 12 bp, synthetic construct
  misc_feature 1..12: note = synthetic [barcode part2]
  source 1..12: mol_type = other DNA
tgcactaagccg

SEQ ID NO: 46544 - DNA, 12 bp, synthetic construct
  misc_feature 1..12: note = synthetic [barcode part2]
  source 1..12: mol_type = other DNA
aatggctgcgtc

SEQ ID NO: 46545 - DNA, 12 bp, synthetic construct
  misc_feature 1..12: note = synthetic [barcode part2]
  source 1..12: mol_type = other DNA
atcacatgctga

SEQ ID NO: 46546 - DNA, 12 bp, synthetic construct
  misc_feature 1..12: note = synthetic [barcode part2]
  source 1..12: mol_type = other DNA
agaacatgtgcg

SEQ ID NO: 46547 - DNA, 12 bp, synthetic construct
  misc_feature 1..12: note = synthetic [barcode part2]
  source 1..12: mol_type = other DNA
tacggtccagca

SEQ ID NO: 46548 - DNA, 12 bp, synthetic construct
  misc_feature 1..12: note = synthetic [barcode part2]
  source 1..12: mol_type = other DNA
tcagtgcaatca

SEQ ID NO: 46549 - DNA, 12 bp, synthetic construct
  misc_feature 1..12: note = synthetic [barcode part2]
  source 1..12: mol_type = other DNA
cagcaattgtac

SEQ ID NO: 46550 - DNA, 12 bp, synthetic construct
  misc_feature 1..12: note = synthetic [barcode part2]
  source 1..12: mol_type = other DNA
tgagctgtatgt

SEQ ID NO: 46551 - DNA, 12 bp, synthetic construct
  misc_feature 1..12: note = synthetic [barcode part2]
  source 1..12: mol_type = other DNA
tgtctctgtgca

SEQ ID NO: 46552 - DNA, 12 bp, synthetic construct
  misc_feature 1..12: note = synthetic [barcode part2]
  source 1..12: mol_type = other DNA
cttatcagccac

SEQ ID NO: 46553 - DNA, 12 bp, synthetic construct
  misc_feature 1..12: note = synthetic [barcode part2]
  source 1..12: mol_type = other DNA
taacagccgtgc

SEQ ID NO: 46554 - DNA, 12 bp, synthetic construct
  misc_feature 1..12: note = synthetic [barcode part2]
  source 1..12: mol_type = other DNA
atagcacggaac

SEQ ID NO: 46555 - DNA, 12 bp, synthetic construct
  misc_feature 1..12: note = synthetic [barcode part2]
  source 1..12: mol_type = other DNA
agacttcttccg

SEQ ID NO: 46556 - DNA, 12 bp, synthetic construct
  misc_feature 1..12: note = synthetic [barcode part2]
  source 1..12: mol_type = other DNA
cagcataactac

SEQ ID NO: 46557 - DNA, 12 bp, synthetic construct
  misc_feature 1..12: note = synthetic [barcode part2]
  source 1..12: mol_type = other DNA
cataccgttaga

SEQ ID NO: 46558 - DNA, 12 bp, synthetic construct
  misc_feature 1..12: note = synthetic [barcode part2]
  source 1..12: mol_type = other DNA
cgcaatcattga

SEQ ID NO: 46559 - DNA, 12 bp, synthetic construct
  misc_feature 1..12: note = synthetic [barcode part2]
  source 1..12: mol_type = other DNA
ttgtctccagca

SEQ ID NO: 46560 - DNA, 12 bp, synthetic construct
  misc_feature 1..12: note = synthetic [barcode part2]
  source 1..12: mol_type = other DNA
acaagttgctgt

SEQ ID NO: 46561 - DNA, 12 bp, synthetic construct
  misc_feature 1..12: note = synthetic [barcode part2]
  source 1..12: mol_type = other DNA
tgtaatccagca

SEQ ID NO: 46562 - DNA, 12 bp, synthetic construct
  misc_feature 1..12: note = synthetic [barcode part2]
  source 1..12: mol_type = other DNA
ttcacgctatgc

SEQ ID NO: 46563 - DNA, 12 bp, synthetic construct
  misc_feature 1..12: note = synthetic [barcode part2]
  source 1..12: mol_type = other DNA
aacttagcgcat

SEQ ID NO: 46564 - DNA, 12 bp, synthetic construct
  misc_feature 1..12: note = synthetic [barcode part2]
  source 1..12: mol_type = other DNA
cacaatccagcg

SEQ ID NO: 46565 - DNA, 12 bp, synthetic construct
  misc_feature 1..12: note = synthetic [barcode part2]
  source 1..12: mol_type = other DNA
ccagaagtaacg

SEQ ID NO: 46566 - DNA, 12 bp, synthetic construct
  misc_feature 1..12: note = synthetic [barcode part2]
  source 1..12: mol_type = other DNA
attcatacagcg

SEQ ID NO: 46567 - DNA, 12 bp, synthetic construct
  misc_feature 1..12: note = synthetic [barcode part2]
  source 1..12: mol_type = other DNA
atggctgccagt

SEQ ID NO: 46568 - DNA, 12 bp, synthetic construct
  misc_feature 1..12: note = synthetic [barcode part2]
  source 1..12: mol_type = other DNA
tggctcttcaac

SEQ ID NO: 46569 - DNA, 12 bp, synthetic construct
  misc_feature 1..12: note = synthetic [barcode part2]
  source 1..12: mol_type = other DNA
acgctaatagtc

SEQ ID NO: 46570 - DNA, 12 bp, synthetic construct
  misc_feature 1..12: note = synthetic [barcode part2]
  source 1..12: mol_type = other DNA
agatacagcgtg

SEQ ID NO: 46571 - DNA, 12 bp, synthetic construct
  misc_feature 1..12: note = synthetic [barcode part2]
  source 1..12: mol_type = other DNA
caagccaacgct

SEQ ID NO: 46572 - DNA, 12 bp, synthetic construct
  misc_feature 1..12: note = synthetic [barcode part2]
  source 1..12: mol_type = other DNA
acaacgcggaat

SEQ ID NO: 46573 - DNA, 12 bp, synthetic construct
  misc_feature 1..12: note = synthetic [barcode part2]
  source 1..12: mol_type = other DNA
caagtgcgctgt

SEQ ID NO: 46574 - DNA, 12 bp, synthetic construct
  misc_feature 1..12: note = synthetic [barcode part2]
  source 1..12: mol_type = other DNA
aatgtgcttagc

SEQ ID NO: 46575 - DNA, 12 bp, synthetic construct
  misc_feature 1..12: note = synthetic [barcode part2]
  source 1..12: mol_type = other DNA
ctaagccgtgca

SEQ ID NO: 46576 - DNA, 12 bp, synthetic construct
  misc_feature 1..12: note = synthetic [barcode part2]
  source 1..12: mol_type = other DNA
cggtacacagct

SEQ ID NO: 46577 - DNA, 12 bp, synthetic construct
  misc_feature 1..12: note = synthetic [barcode part2]
  source 1..12: mol_type = other DNA
ccggtgcagtta

SEQ ID NO: 46578 - DNA, 12 bp, synthetic construct
  misc_feature 1..12: note = synthetic [barcode part2]
  source 1..12: mol_type = other DNA
tgtactactgga

SEQ ID NO: 46579 - DNA, 12 bp, synthetic construct
  misc_feature 1..12: note = synthetic [barcode part2]
  source 1..12: mol_type = other DNA
tagacattggct

SEQ ID NO: 46580 - DNA, 12 bp, synthetic construct
  misc_feature 1..12: note = synthetic [barcode part2]
  source 1..12: mol_type = other DNA
agctcaacgcac

SEQ ID NO: 46581 - DNA, 12 bp, synthetic construct
  misc_feature 1..12: note = synthetic [barcode part2]
  source 1..12: mol_type = other DNA
atatagtctggc

SEQ ID NO: 46582 - DNA, 12 bp, synthetic construct
  misc_feature 1..12: note = synthetic [barcode part2]
  source 1..12: mol_type = other DNA
ctgtatgagccg

SEQ ID NO: 46583 - DNA, 12 bp, synthetic construct
  misc_feature 1..12: note = synthetic [barcode part2]
  source 1..12: mol_type = other DNA
ctattagacgca

SEQ ID NO: 46584 - DNA, 12 bp, synthetic construct
  misc_feature 1..12: note = synthetic [barcode part2]
  source 1..12: mol_type = other DNA
acacacgtctct

SEQ ID NO: 46585 - DNA, 12 bp, synthetic construct
  misc_feature 1..12: note = synthetic [barcode part2]
  source 1..12: mol_type = other DNA
caatggctacat

SEQ ID NO: 46586 - DNA, 12 bp, synthetic construct
  misc_feature 1..12: note = synthetic [barcode part2]
  source 1..12: mol_type = other DNA
taagaccagagc

SEQ ID NO: 46587 - DNA, 12 bp, synthetic construct
  misc_feature 1..12: note = synthetic [barcode part2]
  source 1..12: mol_type = other DNA
agcacatccagc

SEQ ID NO: 46588 - DNA, 12 bp, synthetic construct
  misc_feature 1..12: note = synthetic [barcode part2]
  source 1..12: mol_type = other DNA
agcaacttacac

SEQ ID NO: 46589 - DNA, 12 bp, synthetic construct
  misc_feature 1..12: note = synthetic [barcode part2]
  source 1..12: mol_type = other DNA
tagcataaccgt

SEQ ID NO: 46590 - DNA, 12 bp, synthetic construct
  misc_feature 1..12: note = synthetic [barcode part2]
  source 1..12: mol_type = other DNA
cgtatacttccg

SEQ ID NO: 46591 - DNA, 12 bp, synthetic construct
  misc_feature 1..12: note = synthetic [barcode part2]
  source 1..12: mol_type = other DNA
tgaacatcagct

SEQ ID NO: 46592 - DNA, 12 bp, synthetic construct
  misc_feature 1..12: note = synthetic [barcode part2]
  source 1..12: mol_type = other DNA
acttggctatga

SEQ ID NO: 46593 - DNA, 12 bp, synthetic construct
  misc_feature 1..12: note = synthetic [barcode part2]
  source 1..12: mol_type = other DNA
atggagacgcat

SEQ ID NO: 46594 - DNA, 12 bp, synthetic construct
  misc_feature 1..12: note = synthetic [barcode part2]
  source 1..12: mol_type = other DNA
tatcaatagccg

SEQ ID NO: 46595 - DNA, 12 bp, synthetic construct
  misc_feature 1..12: note = synthetic [barcode part2]
  source 1..12: mol_type = other DNA
caagctgtgcgt

SEQ ID NO: 46596 - DNA, 12 bp, synthetic construct
  misc_feature 1..12: note = synthetic [barcode part2]
  source 1..12: mol_type = other DNA
cgctacactcta

SEQ ID NO: 46597 - DNA, 12 bp, synthetic construct
  misc_feature 1..12: note = synthetic [barcode part2]
  source 1..12: mol_type = other DNA
agcagagcaatc

SEQ ID NO: 46598 - DNA, 12 bp, synthetic construct
  misc_feature 1..12: note = synthetic [barcode part2]
  source 1..12: mol_type = other DNA
atcaccggcgta

SEQ ID NO: 46599 - DNA, 12 bp, synthetic construct
  misc_feature 1..12: note = synthetic [barcode part2]
  source 1..12: mol_type = other DNA
ttcagagagagc

SEQ ID NO: 46600 - DNA, 12 bp, synthetic construct
  misc_feature 1..12: note = synthetic [barcode part2]
  source 1..12: mol_type = other DNA
caataacacgct

SEQ ID NO: 46601 - DNA, 12 bp, synthetic construct
  misc_feature 1..12: note = synthetic [barcode part2]
  source 1..12: mol_type = other DNA
tgagcacgctgt

SEQ ID NO: 46602 - DNA, 12 bp, synthetic construct
  misc_feature 1..12: note = synthetic [barcode part2]
  source 1..12: mol_type = other DNA
taagcgttgatc

SEQ ID NO: 46603 - DNA, 12 bp, synthetic construct
  misc_feature 1..12: note = synthetic [barcode part2]
  source 1..12: mol_type = other DNA
cgccagcttaga

SEQ ID NO: 46604 - DNA, 12 bp, synthetic construct
  misc_feature 1..12: note = synthetic [barcode part2]
  source 1..12: mol_type = other DNA
agatggctgatg

SEQ ID NO: 46605 - DNA, 12 bp, synthetic construct
  misc_feature 1..12: note = synthetic [barcode part2]
  source 1..12: mol_type = other DNA
caatagtgtgct

SEQ ID NO: 46606 - DNA, 12 bp, synthetic construct
  misc_feature 1..12: note = synthetic [barcode part2]
  source 1..12: mol_type = other DNA
taccacgctcta

SEQ ID NO: 46607 - DNA, 12 bp, synthetic construct
  misc_feature 1..12: note = synthetic [barcode part2]
  source 1..12: mol_type = other DNA
tacaccgctgga

SEQ ID NO: 46608 - DNA, 12 bp, synthetic construct
  misc_feature 1..12: note = synthetic [barcode part2]
  source 1..12: mol_type = other DNA
ctccatagcact

SEQ ID NO: 46609 - DNA, 12 bp, synthetic construct
  misc_feature 1..12: note = synthetic [barcode part2]
  source 1..12: mol_type = other DNA
tgttgatggcta

SEQ ID NO: 46610 - DNA, 12 bp, synthetic construct
  misc_feature 1..12: note = synthetic [barcode part2]
  source 1..12: mol_type = other DNA
tgctaacaactg

SEQ ID NO: 46611 - DNA, 12 bp, synthetic construct
  misc_feature 1..12: note = synthetic [barcode part2]
  source 1..12: mol_type = other DNA
catgctgaatca

SEQ ID NO: 46612 - DNA, 12 bp, synthetic construct
  misc_feature 1..12: note = synthetic [barcode part2]
  source 1..12: mol_type = other DNA
ataagccactac

SEQ ID NO: 46613 - DNA, 12 bp, synthetic construct
  misc_feature 1..12: note = synthetic [barcode part2]
  source 1..12: mol_type = other DNA
cagtgtagttac

SEQ ID NO: 46614 - DNA, 12 bp, synthetic construct
  misc_feature 1..12: note = synthetic [barcode part2]
  source 1..12: mol_type = other DNA
cggctaatctct

SEQ ID NO: 46615 - DNA, 12 bp, synthetic construct
  misc_feature 1..12: note = synthetic [barcode part2]
  source 1..12: mol_type = other DNA
cgcgttaccaga

SEQ ID NO: 46616 - DNA, 12 bp, synthetic construct
  misc_feature 1..12: note = synthetic [barcode part2]
  source 1..12: mol_type = other DNA
ccgcatattaga

SEQ ID NO: 46617 - DNA, 12 bp, synthetic construct
  misc_feature 1..12: note = synthetic [barcode part2]
  source 1..12: mol_type = other DNA
tgtcaatggtca

SEQ ID NO: 46618 - DNA, 12 bp, synthetic construct
  misc_feature 1..12: note = synthetic [barcode part2]
  source 1..12: mol_type = other DNA
cagtatgatcac

SEQ ID NO: 46619 - DNA, 12 bp, synthetic construct
  misc_feature 1..12: note = synthetic [barcode part2]
  source 1..12: mol_type = other DNA
cggatgtgttat

SEQ ID NO: 46620 - DNA, 12 bp, synthetic construct
  misc_feature 1..12: note = synthetic [barcode part2]
  source 1..12: mol_type = other DNA
cggattgtgcgt

SEQ ID NO: 46621 - DNA, 12 bp, synthetic construct
  misc_feature 1..12: note = synthetic [barcode part2]
  source 1..12: mol_type = other DNA
tgagcgttaact

SEQ ID NO: 46622 - DNA, 12 bp, synthetic construct
  misc_feature 1..12: note = synthetic [barcode part2]
  source 1..12: mol_type = other DNA
atgttccgcact

SEQ ID NO: 46623 - DNA, 12 bp, synthetic construct
  misc_feature 1..12: note = synthetic [barcode part2]
  source 1..12: mol_type = other DNA
tactcaatggca

SEQ ID NO: 46624 - DNA, 12 bp, synthetic construct
  misc_feature 1..12: note = synthetic [barcode part2]
  source 1..12: mol_type = other DNA
atcactagcaca

SEQ ID NO: 46625 - DNA, 12 bp, synthetic construct
  misc_feature 1..12: note = synthetic [barcode part2]
  source 1..12: mol_type = other DNA
tgacaatacgct

SEQ ID NO: 46626 - DNA, 12 bp, synthetic construct
  misc_feature 1..12: note = synthetic [barcode part2]
  source 1..12: mol_type = other DNA
aactcaacacgt

SEQ ID NO: 46627 - DNA, 12 bp, synthetic construct
  misc_feature 1..12: note = synthetic [barcode part2]
  source 1..12: mol_type = other DNA
tacagccattga

SEQ ID NO: 46628 - DNA, 12 bp, synthetic construct
  misc_feature 1..12: note = synthetic [barcode part2]
  source 1..12: mol_type = other DNA
tgtgaagcgtga

SEQ ID NO: 46629 - DNA, 12 bp, synthetic construct
  misc_feature 1..12: note = synthetic [barcode part2]
  source 1..12: mol_type = other DNA
ccgtgatagaga

SEQ ID NO: 46630 - DNA, 12 bp, synthetic construct
  misc_feature 1..12: note = synthetic [barcode part2]
  source 1..12: mol_type = other DNA
ccagattatacg

SEQ ID NO: 46631 - DNA, 12 bp, synthetic construct
  misc_feature 1..12: note = synthetic [barcode part2]
  source 1..12: mol_type = other DNA
tctgagagaagc

SEQ ID NO: 46632 - DNA, 12 bp, synthetic construct
  misc_feature 1..12: note = synthetic [barcode part2]
  source 1..12: mol_type = other DNA
ccagagatagtg

SEQ ID NO: 46633 - DNA, 12 bp, synthetic construct
  misc_feature 1..12: note = synthetic [barcode part2]
  source 1..12: mol_type = other DNA
aacaactgtgct

SEQ ID NO: 46634 - DNA, 12 bp, synthetic construct
  misc_feature 1..12: note = synthetic [barcode part2]
  source 1..12: mol_type = other DNA
tagcaattgcgt

SEQ ID NO: 46635 - DNA, 12 bp, synthetic construct
  misc_feature 1..12: note = synthetic [barcode part2]
  source 1..12: mol_type = other DNA
catggctgctga

SEQ ID NO: 46636 - DNA, 12 bp, synthetic construct
  misc_feature 1..12: note = synthetic [barcode part2]
  source 1..12: mol_type = other DNA
atgcgtggaagt

SEQ ID NO: 46637 - DNA, 12 bp, synthetic construct
  misc_feature 1..12: note = synthetic [barcode part2]
  source 1..12: mol_type = other DNA
cagaactgaagc

SEQ ID NO: 46638 - DNA, 12 bp, synthetic construct
  misc_feature 1..12: note = synthetic [barcode part2]
  source 1..12: mol_type = other DNA
cagatgtgctgc

SEQ ID NO: 46639 - DNA, 12 bp, synthetic construct
  misc_feature 1..12: note = synthetic [barcode part2]
  source 1..12: mol_type = other DNA
cttgcacatgtc

SEQ ID NO: 46640 - DNA, 12 bp, synthetic construct
  misc_feature 1..12: note = synthetic [barcode part2]
  source 1..12: mol_type = other DNA
caatgtagccat

SEQ ID NO: 46641 - DNA, 12 bp, synthetic construct
  misc_feature 1..12: note = synthetic [barcode part2]
  source 1..12: mol_type = other DNA
ctcatcaaccgt

SEQ ID NO: 46642 - DNA, 12 bp, synthetic construct
  misc_feature 1..12: note = synthetic [barcode part2]
  source 1..12: mol_type = other DNA
acagaagcgcat

SEQ ID NO: 46643 - DNA, 12 bp, synthetic construct
  misc_feature 1..12: note = synthetic [barcode part2]
  source 1..12: mol_type = other DNA
taagctgtgtac

SEQ ID NO: 46644 - DNA, 12 bp, synthetic construct
  misc_feature 1..12: note = synthetic [barcode part2]
  source 1..12: mol_type = other DNA
cgtcaatggctg

SEQ ID NO: 46645 - DNA, 12 bp, synthetic construct
  misc_feature 1..12: note = synthetic [barcode part2]
  source 1..12: mol_type = other DNA
ccggcacaacta

SEQ ID NO: 46646 - DNA, 12 bp, synthetic construct
  misc_feature 1..12: note = synthetic [barcode part2]
  source 1..12: mol_type = other DNA
ctcactagccat

SEQ ID NO: 46647 - DNA, 12 bp, synthetic construct
  misc_feature 1..12: note = synthetic [barcode part2]
  source 1..12: mol_type = other DNA
ctcatgttgcgt

SEQ ID NO: 46648 - DNA, 12 bp, synthetic construct
  misc_feature 1..12: note = synthetic [barcode part2]
  source 1..12: mol_type = other DNA
agtgagagccat

SEQ ID NO: 46649 - DNA, 12 bp, synthetic construct
  misc_feature 1..12: note = synthetic [barcode part2]
  source 1..12: mol_type = other DNA
ctgagagtaacg

SEQ ID NO: 46650 - DNA, 12 bp, synthetic construct
  misc_feature 1..12: note = synthetic [barcode part2]
  source 1..12: mol_type = other DNA
cattaacggtca

SEQ ID NO: 46651 - DNA, 12 bp, synthetic construct
  misc_feature 1..12: note = synthetic [barcode part2]
  source 1..12: mol_type = other DNA
cattggcttaga

SEQ ID NO: 46652 - DNA, 12 bp, synthetic construct
  misc_feature 1..12: note = synthetic [barcode part2]
  source 1..12: mol_type = other DNA
tgtccagtagta

SEQ ID NO: 46653 - DNA, 12 bp, synthetic construct
  misc_feature 1..12: note = synthetic [barcode part2]
  source 1..12: mol_type = other DNA
agcttgatgcgc

SEQ ID NO: 46654 - DNA, 12 bp, synthetic construct
  misc_feature 1..12: note = synthetic [barcode part2]
  source 1..12: mol_type = other DNA
ctcataccacgt

SEQ ID NO: 46655 - DNA, 12 bp, synthetic construct
  misc_feature 1..12: note = synthetic [barcode part2]
  source 1..12: mol_type = other DNA
ttggcgtagcca

SEQ ID NO: 46656 - DNA, 12 bp, synthetic construct
  misc_feature 1..12: note = synthetic [barcode part2]
  source 1..12: mol_type = other DNA
catccagtgata

SEQ ID NO: 46657 - DNA, 12 bp, synthetic construct
  misc_feature 1..12: note = synthetic [barcode part2]
  source 1..12: mol_type = other DNA
catcacggaaga

SEQ ID NO: 46658 - DNA, 12 bp, synthetic construct
  misc_feature 1..12: note = synthetic [barcode part2]
  source 1..12: mol_type = other DNA
tacggctcaata

SEQ ID NO: 46659 - DNA, 12 bp, synthetic construct
  misc_feature 1..12: note = synthetic [barcode part2]
  source 1..12: mol_type = other DNA
ttgcggtgaaga

SEQ ID NO: 46660 - DNA, 12 bp, synthetic construct
  misc_feature 1..12: note = synthetic [barcode part2]
  source 1..12: mol_type = other DNA
ttcactagctgc

SEQ ID NO: 46661 - DNA, 12 bp, synthetic construct
  misc_feature 1..12: note = synthetic [barcode part2]
  source 1..12: mol_type = other DNA
ttgcgcagacca

SEQ ID NO: 46662 - DNA, 12 bp, synthetic construct
  misc_feature 1..12: note = synthetic [barcode part2]
  source 1..12: mol_type = other DNA
tcagccattcca

SEQ ID NO: 46663 - DNA, 12 bp, synthetic construct
  misc_feature 1..12: note = synthetic [barcode part2]
  source 1..12: mol_type = other DNA
agctgtaagttc

SEQ ID NO: 46664 - DNA, 12 bp, synthetic construct
  misc_feature 1..12: note = synthetic [barcode part2]
  source 1..12: mol_type = other DNA
tatggcttaacg

SEQ ID NO: 46665 - DNA, 12 bp, synthetic construct
  misc_feature 1..12: note = synthetic [barcode part2]
  source 1..12: mol_type = other DNA
ttgcgcaagtta

SEQ ID NO: 46666 - DNA, 12 bp, synthetic construct
  misc_feature 1..12: note = synthetic [barcode part2]
  source 1..12: mol_type = other DNA
actacgcgctga

SEQ ID NO: 46667 - DNA, 12 bp, synthetic construct
  misc_feature 1..12: note = synthetic [barcode part2]
  source 1..12: mol_type = other DNA
cttggctgattc

SEQ ID NO: 46668 - DNA, 12 bp, synthetic construct
  misc_feature 1..12: note = synthetic [barcode part2]
  source 1..12: mol_type = other DNA
tcacgcaagcca

SEQ ID NO: 46669 - DNA, 12 bp, synthetic construct
  misc_feature 1..12: note = synthetic [barcode part2]
  source 1..12: mol_type = other DNA
cgctaacggcta

SEQ ID NO: 46670 - DNA, 12 bp, synthetic construct
  misc_feature 1..12: note = synthetic [barcode part2]
  source 1..12: mol_type = other DNA
cgcaactgctga

SEQ ID NO: 46671 - DNA, 12 bp, synthetic construct
  misc_feature 1..12: note = synthetic [barcode part2]
  source 1..12: mol_type = other DNA
cattgcgttcca

SEQ ID NO: 46672 - DNA, 12 bp, synthetic construct
  misc_feature 1..12: note = synthetic [barcode part2]
  source 1..12: mol_type = other DNA
atcacgcattga

SEQ ID NO: 46673 - DNA, 12 bp, synthetic construct
  misc_feature 1..12: note = synthetic [barcode part2]
  source 1..12: mol_type = other DNA
atccagcgcaca

SEQ ID NO: 46674 - DNA, 12 bp, synthetic construct
  misc_feature 1..12: note = synthetic [barcode part2]
  source 1..12: mol_type = other DNA
tcaccagatgta

SEQ ID NO: 46675 - DNA, 12 bp, synthetic construct
  misc_feature 1..12: note = synthetic [barcode part2]
  source 1..12: mol_type = other DNA
actggctcttca

SEQ ID NO: 46676 - DNA, 12 bp, synthetic construct
  misc_feature 1..12: note = synthetic [barcode part2]
  source 1..12: mol_type = other DNA
atcattgacgca

SEQ ID NO: 46677 - DNA, 12 bp, synthetic construct
  misc_feature 1..12: note = synthetic [barcode part2]
  source 1..12: mol_type = other DNA
ctccgtgtgtat

SEQ ID NO: 46678 - DNA, 12 bp, synthetic construct
  misc_feature 1..12: note = synthetic [barcode part2]
  source 1..12: mol_type = other DNA
ccgcgtgaatca

SEQ ID NO: 46679 - DNA, 12 bp, synthetic construct
  misc_feature 1..12: note = synthetic [barcode part2]
  source 1..12: mol_type = other DNA
cagcggttacac

SEQ ID NO: 46680 - DNA, 12 bp, synthetic construct
  misc_feature 1..12: note = synthetic [barcode part2]
  source 1..12: mol_type = other DNA
cttatacgcgtc

SEQ ID NO: 46681 - DNA, 12 bp, synthetic construct
  misc_feature 1..12: note = synthetic [barcode part2]
  source 1..12: mol_type = other DNA
taccggtccaga

SEQ ID NO: 46682 - DNA, 12 bp, synthetic construct
  misc_feature 1..12: note = synthetic [barcode part2]
  source 1..12: mol_type = other DNA
ctcacgcatact

SEQ ID NO: 46683 - DNA, 12 bp, synthetic construct
  misc_feature 1..12: note = synthetic [barcode part2]
  source 1..12: mol_type = other DNA
ctgccagatgtg

SEQ ID NO: 46684 - DNA, 12 bp, synthetic construct
  misc_feature 1..12: note = synthetic [barcode part2]
  source 1..12: mol_type = other DNA
cttcacggtatc

SEQ ID NO: 46685 - DNA, 12 bp, synthetic construct
  misc_feature 1..12: note = synthetic [barcode part2]
  source 1..12: mol_type = other DNA
actcaatgcaca

SEQ ID NO: 46686 - DNA, 12 bp, synthetic construct
  misc_feature 1..12: note = synthetic [barcode part2]
  source 1..12: mol_type = other DNA
acgctaagctgc

SEQ ID NO: 46687 - DNA, 12 bp, synthetic construct
  misc_feature 1..12: note = synthetic [barcode part2]
  source 1..12: mol_type = other DNA
tagcgcagccat

SEQ ID NO: 46688 - DNA, 12 bp, synthetic construct
  misc_feature 1..12: note = synthetic [barcode part2]
  source 1..12: mol_type = other DNA
atgcagcaatct

SEQ ID NO: 46689 - DNA, 12 bp, synthetic construct
  misc_feature 1..12: note = synthetic [barcode part2]
  source 1..12: mol_type = other DNA
tcagtgcggcta

SEQ ID NO: 46690 - DNA, 12 bp, synthetic construct
  misc_feature 1..12: note = synthetic [barcode part2]
  source 1..12: mol_type = other DNA
cttgaagctctc

SEQ ID NO: 46691 - DNA, 12 bp, synthetic construct
  misc_feature 1..12: note = synthetic [barcode part2]
  source 1..12: mol_type = other DNA
aacggaacagct

SEQ ID NO: 46692 - DNA, 12 bp, synthetic construct
  misc_feature 1..12: note = synthetic [barcode part2]
  source 1..12: mol_type = other DNA
cattgatagcca

SEQ ID NO: 46693 - DNA, 12 bp, synthetic construct
  misc_feature 1..12: note = synthetic [barcode part2]
  source 1..12: mol_type = other DNA
atagaagcacgc

SEQ ID NO: 46694 - DNA, 12 bp, synthetic construct
  misc_feature 1..12: note = synthetic [barcode part2]
  source 1..12: mol_type = other DNA
tgtctggtgata

SEQ ID NO: 46695 - DNA, 12 bp, synthetic construct
  misc_feature 1..12: note = synthetic [barcode part2]
  source 1..12: mol_type = other DNA
attcagcacatg

SEQ ID NO: 46696 - DNA, 12 bp, synthetic construct
  misc_feature 1..12: note = synthetic [barcode part2]
  source 1..12: mol_type = other DNA
ccagcacagttg

SEQ ID NO: 46697 - DNA, 12 bp, synthetic construct
  misc_feature 1..12: note = synthetic [barcode part2]
  source 1..12: mol_type = other DNA
tagcgtgatcat

SEQ ID NO: 46698 - DNA, 12 bp, synthetic construct
  misc_feature 1..12: note = synthetic [barcode part2]
  source 1..12: mol_type = other DNA
ccagtatggctg

SEQ ID NO: 46699 - DNA, 12 bp, synthetic construct
  misc_feature 1..12: note = synthetic [barcode part2]
  source 1..12: mol_type = other DNA
ctaacatccaga

SEQ ID NO: 46700 - DNA, 12 bp, synthetic construct
  misc_feature 1..12: note = synthetic [barcode part2]
  source 1..12: mol_type = other DNA
cgctcaacggta

SEQ ID NO: 46701 - DNA, 12 bp, synthetic construct
  misc_feature 1..12: note = synthetic [barcode part2]
  source 1..12: mol_type = other DNA
aacggcttgtat

SEQ ID NO: 46702 - DNA, 12 bp, synthetic construct
  misc_feature 1..12: note = synthetic [barcode part2]
  source 1..12: mol_type = other DNA
atgtcaacagct

SEQ ID NO: 46703 - DNA, 12 bp, synthetic construct
  misc_feature 1..12: note = synthetic [barcode part2]
  source 1..12: mol_type = other DNA
ttgccagataca

SEQ ID NO: 46704 - DNA, 12 bp, synthetic construct
  misc_feature 1..12: note = synthetic [barcode part2]
  source 1..12: mol_type = other DNA
ttatgtaagccg

SEQ ID NO: 46705 - DNA, 12 bp, synthetic construct
  misc_feature 1..12: note = synthetic [barcode part2]
  source 1..12: mol_type = other DNA
acatctcacgct

SEQ ID NO: 46706 - DNA, 12 bp, synthetic construct
  misc_feature 1..12: note = synthetic [barcode part2]
  source 1..12: mol_type = other DNA
ttgctggacgca

SEQ ID NO: 46707 - DNA, 12 bp, synthetic construct
  misc_feature 1..12: note = synthetic [barcode part2]
  source 1..12: mol_type = other DNA
ccgctaatatga

SEQ ID NO: 46708 - DNA, 12 bp, synthetic construct
  misc_feature 1..12: note = synthetic [barcode part2]
  source 1..12: mol_type = other DNA
ctgaactgtatg

SEQ ID NO: 46709 - DNA, 12 bp, synthetic construct
  misc_feature 1..12: note = synthetic [barcode part2]
  source 1..12: mol_type = other DNA
cttgtgcacatc

SEQ ID NO: 46710 - DNA, 12 bp, synthetic construct
  misc_feature 1..12: note = synthetic [barcode part2]
  source 1..12: mol_type = other DNA
attatcagcacg

SEQ ID NO: 46711 - DNA, 12 bp, synthetic construct
  misc_feature 1..12: note = synthetic [barcode part2]
  source 1..12: mol_type = other DNA
ctaatgtctgga

SEQ ID NO: 46712 - DNA, 12 bp, synthetic construct
  misc_feature 1..12: note = synthetic [barcode part2]
  source 1..12: mol_type = other DNA
cgctgatagtta

SEQ ID NO: 46713 - DNA, 12 bp, synthetic construct
  misc_feature 1..12: note = synthetic [barcode part2]
  source 1..12: mol_type = other DNA
acactctacgct

SEQ ID NO: 46714 - DNA, 12 bp, synthetic construct
  misc_feature 1..12: note = synthetic [barcode part2]
  source 1..12: mol_type = other DNA
ttcttccagagc

SEQ ID NO: 46715 - DNA, 12 bp, synthetic construct
  misc_feature 1..12: note = synthetic [barcode part2]
  source 1..12: mol_type = other DNA
ccgcacggatta

SEQ ID NO: 46716 - DNA, 12 bp, synthetic construct
  misc_feature 1..12: note = synthetic [barcode part2]
  source 1..12: mol_type = other DNA
attccagctctg

SEQ ID NO: 46717 - DNA, 12 bp, synthetic construct
  misc_feature 1..12: note = synthetic [barcode part2]
  source 1..12: mol_type = other DNA
ccgtgtaccaga

SEQ ID NO: 46718 - DNA, 12 bp, synthetic construct
  misc_feature 1..12: note = synthetic [barcode part2]
  source 1..12: mol_type = other DNA
agcacatgattc

SEQ ID NO: 46719 - DNA, 12 bp, synthetic construct
  misc_feature 1..12: note = synthetic [barcode part2]
  source 1..12: mol_type = other DNA
ctaatgtggcta

SEQ ID NO: 46720 - DNA, 12 bp, synthetic construct
  misc_feature 1..12: note = synthetic [barcode part2]
  source 1..12: mol_type = other DNA
aatagccgtatc

SEQ ID NO: 46721 - DNA, 12 bp, synthetic construct
  misc_feature 1..12: note = synthetic [barcode part2]
  source 1..12: mol_type = other DNA
cttgaccaactc

SEQ ID NO: 46722 - DNA, 12 bp, synthetic construct
  misc_feature 1..12: note = synthetic [barcode part2]
  source 1..12: mol_type = other DNA
agcggctatgtc

SEQ ID NO: 46723 - DNA, 12 bp, synthetic construct
  misc_feature 1..12: note = synthetic [barcode part2]
  source 1..12: mol_type = other DNA
accgtatcagcg

SEQ ID NO: 46724 - DNA, 12 bp, synthetic construct
  misc_feature 1..12: note = synthetic [barcode part2]
  source 1..12: mol_type = other DNA
cgtctaacagcg

SEQ ID NO: 46725 - DNA, 12 bp, synthetic construct
  misc_feature 1..12: note = synthetic [barcode part2]
  source 1..12: mol_type = other DNA
tccgtatacgct

SEQ ID NO: 46726 - DNA, 12 bp, synthetic construct
  misc_feature 1..12: note = synthetic [barcode part2]
  source 1..12: mol_type = other DNA
tacagttgctga

SEQ ID NO: 46727 - DNA, 12 bp, synthetic construct
  misc_feature 1..12: note = synthetic [barcode part2]
  source 1..12: mol_type = other DNA
cgccaatccaga

SEQ ID NO: 46728 - DNA, 12 bp, synthetic construct
  misc_feature 1..12: note = synthetic [barcode part2]
  source 1..12: mol_type = other DNA
aagagttggctg

SEQ ID NO: 46729 - DNA, 12 bp, synthetic construct
  misc_feature 1..12: note = synthetic [barcode part2]
  source 1..12: mol_type = other DNA
ctggagataacg

SEQ ID NO: 46730 - DNA, 12 bp, synthetic construct
  misc_feature 1..12: note = synthetic [barcode part2]
  source 1..12: mol_type = other DNA
catactaccaga

SEQ ID NO: 46731 - DNA, 12 bp, synthetic construct
  misc_feature 1..12: note = synthetic [barcode part2]
  source 1..12: mol_type = other DNA
atccgtgcaata

SEQ ID NO: 46732 - DNA, 12 bp, synthetic construct
  misc_feature 1..12: note = synthetic [barcode part2]
  source 1..12: mol_type = other DNA
agctgcgttgac

SEQ ID NO: 46733 - DNA, 12 bp, synthetic construct
  misc_feature 1..12: note = synthetic [barcode part2]
  source 1..12: mol_type = other DNA
ctccagcattgt

SEQ ID NO: 46734 - DNA, 12 bp, synthetic construct
  misc_feature 1..12: note = synthetic [barcode part2]
  source 1..12: mol_type = other DNA
tgagccacgtgt

SEQ ID NO: 46735 - DNA, 12 bp, synthetic construct
  misc_feature 1..12: note = synthetic [barcode part2]
  source 1..12: mol_type = other DNA
ttcaactggctc

SEQ ID NO: 46736 - DNA, 12 bp, synthetic construct
  misc_feature 1..12: note = synthetic [barcode part2]
  source 1..12: mol_type = other DNA
atgttgagctgt

SEQ ID NO: 46737 - DNA, 12 bp, synthetic construct
  misc_feature 1..12: note = synthetic [barcode part2]
  source 1..12: mol_type = other DNA
cattggcagtta

SEQ ID NO: 46738 - DNA, 12 bp, synthetic construct
  misc_feature 1..12: note = synthetic [barcode part2]
  source 1..12: mol_type = other DNA
catatcactgga

SEQ ID NO: 46739 - DNA, 12 bp, synthetic construct
  misc_feature 1..12: note = synthetic [barcode part2]
  source 1..12: mol_type = other DNA
tgtcagcaatca

SEQ ID NO: 46740 - DNA, 12 bp, synthetic construct
  misc_feature 1..12: note = synthetic [barcode part2]
  source 1..12: mol_type = other DNA
ttgctctcagca

SEQ ID NO: 46741 - DNA, 12 bp, synthetic construct
  misc_feature 1..12: note = synthetic [barcode part2]
  source 1..12: mol_type = other DNA
ctccaatgctgt

SEQ ID NO: 46742 - DNA, 12 bp, synthetic construct
  misc_feature 1..12: note = synthetic [barcode part2]
  source 1..12: mol_type = other DNA
catgcactctca

SEQ ID NO: 46743 - DNA, 12 bp, synthetic construct
  misc_feature 1..12: note = synthetic [barcode part2]
  source 1..12: mol_type = other DNA
cggtagtacgct

SEQ ID NO: 46744 - DNA, 12 bp, synthetic construct
  misc_feature 1..12: note = synthetic [barcode part2]
  source 1..12: mol_type = other DNA
cgcaatctaaca

SEQ ID NO: 46745 - DNA, 12 bp, synthetic construct
  misc_feature 1..12: note = synthetic [barcode part2]
  source 1..12: mol_type = other DNA
caagcacactat

SEQ ID NO: 46746 - DNA, 12 bp, synthetic construct
  misc_feature 1..12: note = synthetic [barcode part2]
  source 1..12: mol_type = other DNA
tgatgcgcagct

SEQ ID NO: 46747 - DNA, 12 bp, synthetic construct
  misc_feature 1..12: note = synthetic [barcode part2]
  source 1..12: mol_type = other DNA
agttcaagtgct

SEQ ID NO: 46748 - DNA, 12 bp, synthetic construct
  misc_feature 1..12: note = synthetic [barcode part2]
  source 1..12: mol_type = other DNA
agccatagattc

SEQ ID NO: 46749 - DNA, 12 bp, synthetic construct
  misc_feature 1..12: note = synthetic [barcode part2]
  source 1..12: mol_type = other DNA
ctaagccacata

SEQ ID NO: 46750 - DNA, 12 bp, synthetic construct
  misc_feature 1..12: note = synthetic [barcode part2]
  source 1..12: mol_type = other DNA
ttgatacagcca

SEQ ID NO: 46751 - DNA, 12 bp, synthetic construct
  misc_feature 1..12: note = synthetic [barcode part2]
  source 1..12: mol_type = other DNA
actgaagccaga

SEQ ID NO: 46752 - DNA, 12 bp, synthetic construct
  misc_feature 1..12: note = synthetic [barcode part2]
  source 1..12: mol_type = other DNA
ctatgcgccaga

SEQ ID NO: 46753 - DNA, 12 bp, synthetic construct
  misc_feature 1..12: note = synthetic [barcode part2]
  source 1..12: mol_type = other DNA
cagatcacgcac

SEQ ID NO: 46754 - DNA, 12 bp, synthetic construct
  misc_feature 1..12: note = synthetic [barcode part2]
  source 1..12: mol_type = other DNA
acgcagcttagc

SEQ ID NO: 46755 - DNA, 12 bp, synthetic construct
  misc_feature 1..12: note = synthetic [barcode part2]
  source 1..12: mol_type = other DNA
aatatacggctc

SEQ ID NO: 46756 - DNA, 12 bp, synthetic construct
  misc_feature 1..12: note = synthetic [barcode part2]
  source 1..12: mol_type = other DNA
acgtgatagttc

SEQ ID NO: 46757 - DNA, 12 bp, synthetic construct
  misc_feature 1..12: note = synthetic [barcode part2]
  source 1..12: mol_type = other DNA
ctgaatcacatg

SEQ ID NO: 46758 - DNA, 12 bp, synthetic construct
  misc_feature 1..12: note = synthetic [barcode part2]
  source 1..12: mol_type = other DNA
cagctaagaagc

SEQ ID NO: 46759 - DNA, 12 bp, synthetic construct
  misc_feature 1..12: note = synthetic [barcode part2]
  source 1..12: mol_type = other DNA
cagacgccaatc

SEQ ID NO: 46760 - DNA, 12 bp, synthetic construct
  misc_feature 1..12: note = synthetic [barcode part2]
  source 1..12: mol_type = other DNA
cttcagccaatc

SEQ ID NO: 46761 - DNA, 12 bp, synthetic construct
  misc_feature 1..12: note = synthetic [barcode part2]
  source 1..12: mol_type = other DNA
actgtatcgaca

SEQ ID NO: 46762 - DNA, 12 bp, synthetic construct
  misc_feature 1..12: note = synthetic [barcode part2]
  source 1..12: mol_type = other DNA
aatgtgcagttc

SEQ ID NO: 46763 - DNA, 12 bp, synthetic construct
  misc_feature 1..12: note = synthetic [barcode part2]
  source 1..12: mol_type = other DNA
actcgtgcagca

SEQ ID NO: 46764 - DNA, 12 bp, synthetic construct
  misc_feature 1..12: note = synthetic [barcode part2]
  source 1..12: mol_type = other DNA
ccgcttcattga

SEQ ID NO: 46765 - DNA, 12 bp, synthetic construct
  misc_feature 1..12: note = synthetic [barcode part2]
  source 1..12: mol_type = other DNA
cagtggcgtatc

SEQ ID NO: 46766 - DNA, 12 bp, synthetic construct
  misc_feature 1..12: note = synthetic [barcode part2]
  source 1..12: mol_type = other DNA
aatgattcacgc

SEQ ID NO: 46767 - DNA, 12 bp, synthetic construct
  misc_feature 1..12: note = synthetic [barcode part2]
  source 1..12: mol_type = other DNA
cgtagagatacg

SEQ ID NO: 46768 - DNA, 12 bp, synthetic construct
  misc_feature 1..12: note = synthetic [barcode part2]
  source 1..12: mol_type = other DNA
agtgtgctcaat

SEQ ID NO: 46769 - DNA, 12 bp, synthetic construct
  misc_feature 1..12: note = synthetic [barcode part2]
  source 1..12: mol_type = other DNA
agaactatggcg

SEQ ID NO: 46770 - DNA, 12 bp, synthetic construct
  misc_feature 1..12: note = synthetic [barcode part2]
  source 1..12: mol_type = other DNA
cagcacgcaatc

SEQ ID NO: 46771 - DNA, 12 bp, synthetic construct
  misc_feature 1..12: note = synthetic [barcode part2]
  source 1..12: mol_type = other DNA
ctgcgtgagttg

SEQ ID NO: 46772 - DNA, 12 bp, synthetic construct
  misc_feature 1..12: note = synthetic [barcode part2]
  source 1..12: mol_type = other DNA
atagctgtcaac

SEQ ID NO: 46773 - DNA, 12 bp, synthetic construct
  misc_feature 1..12: note = synthetic [barcode part2]
  source 1..12: mol_type = other DNA
cttcttcgagac

SEQ ID NO: 46774 - DNA, 12 bp, synthetic construct
  misc_feature 1..12: note = synthetic [barcode part2]
  source 1..12: mol_type = other DNA
aagagccaactg

SEQ ID NO: 46775 - DNA, 12 bp, synthetic construct
  misc_feature 1..12: note = synthetic [barcode part2]
  source 1..12: mol_type = other DNA
ccgactattcca

SEQ ID NO: 46776 - DNA, 12 bp, synthetic construct
  misc_feature 1..12: note = synthetic [barcode part2]
  source 1..12: mol_type = other DNA
cggactaatact

SEQ ID NO: 46777 - DNA, 12 bp, synthetic construct
  misc_feature 1..12: note = synthetic [barcode part2]
  source 1..12: mol_type = other DNA
atcgcgtcaata

SEQ ID NO: 46778 - DNA, 12 bp, synthetic construct
  misc_feature 1..12: note = synthetic [barcode part2]
  source 1..12: mol_type = other DNA
agcatactcggc

SEQ ID NO: 46779 - DNA, 12 bp, synthetic construct
  misc_feature 1..12: note = synthetic [barcode part2]
  source 1..12: mol_type = other DNA
acaagccattgt

SEQ ID NO: 46780 - DNA, 12 bp, synthetic construct
  misc_feature 1..12: note = synthetic [barcode part2]
  source 1..12: mol_type = other DNA
cgagccatatgc

SEQ ID NO: 46781 - DNA, 12 bp, synthetic construct
  misc_feature 1..12: note = synthetic [barcode part2]
  source 1..12: mol_type = other DNA
cggcaattatgt

SEQ ID NO: 46782 - DNA, 12 bp, synthetic construct
  misc_feature 1..12: note = synthetic [barcode part2]
  source 1..12: mol_type = other DNA
ctacgtgaacta

SEQ ID NO: 46783 - DNA, 12 bp, synthetic construct
  misc_feature 1..12: note = synthetic [barcode part2]
  source 1..12: mol_type = other DNA
agctcaatatgc

SEQ ID NO: 46784 - DNA, 12 bp, synthetic construct
  misc_feature 1..12: note = synthetic [barcode part2]
  source 1..12: mol_type = other DNA
acggctgaactc

SEQ ID NO: 46785 - DNA, 12 bp, synthetic construct
  misc_feature 1..12: note = synthetic [barcode part2]
  source 1..12: mol_type = other DNA
cagaatcagagc

SEQ ID NO: 46786 - DNA, 12 bp, synthetic construct
  misc_feature 1..12: note = synthetic [barcode part2]
  source 1..12: mol_type = other DNA
cgaatacgctgc

SEQ ID NO: 46787 - DNA, 12 bp, synthetic construct
  misc_feature 1..12: note = synthetic [barcode part2]
  source 1..12: mol_type = other DNA
ctggcgtagttg

SEQ ID NO: 46788 - DNA, 12 bp, synthetic construct
  misc_feature 1..12: note = synthetic [barcode part2]
  source 1..12: mol_type = other DNA
aagcgcaatacg

SEQ ID NO: 46789 - DNA, 12 bp, synthetic construct
  misc_feature 1..12: note = synthetic [barcode part2]
  source 1..12: mol_type = other DNA
agttcaatgcgt

SEQ ID NO: 46790 - DNA, 12 bp, synthetic construct
  misc_feature 1..12: note = synthetic [barcode part2]
  source 1..12: mol_type = other DNA
atagccactaac

SEQ ID NO: 46791 - DNA, 12 bp, synthetic construct
  misc_feature 1..12: note = synthetic [barcode part2]
  source 1..12: mol_type = other DNA
caacacggccat

SEQ ID NO: 46792 - DNA, 12 bp, synthetic construct
  misc_feature 1..12: note = synthetic [barcode part2]
  source 1..12: mol_type = other DNA
acttctctcgga

SEQ ID NO: 46793 - DNA, 12 bp, synthetic construct
  misc_feature 1..12: note = synthetic [barcode part2]
  source 1..12: mol_type = other DNA
catggaagcaca

SEQ ID NO: 46794 - DNA, 12 bp, synthetic construct
  misc_feature 1..12: note = synthetic [barcode part2]
  source 1..12: mol_type = other DNA
cgaatcagcgtc

SEQ ID NO: 46795 - DNA, 12 bp, synthetic construct
  misc_feature 1..12: note = synthetic [barcode part2]
  source 1..12: mol_type = other DNA
cagtagtatgtc

SEQ ID NO: 46796 - DNA, 12 bp, synthetic construct
  misc_feature 1..12: note = synthetic [barcode part2]
  source 1..12: mol_type = other DNA
agttctctggct

SEQ ID NO: 46797 - DNA, 12 bp, synthetic construct
  misc_feature 1..12: note = synthetic [barcode part2]
  source 1..12: mol_type = other DNA
aagcagctgatg

SEQ ID NO: 46798 - DNA, 12 bp, synthetic construct
  misc_feature 1..12: note = synthetic [barcode part2]
  source 1..12: mol_type = other DNA
cttggaagaagc

SEQ ID NO: 46799 - DNA, 12 bp, synthetic construct
  misc_feature 1..12: note = synthetic [barcode part2]
  source 1..12: mol_type = other DNA
cgaacgctgatc

SEQ ID NO: 46800 - DNA, 12 bp, synthetic construct
  misc_feature 1..12: note = synthetic [barcode part2]
  source 1..12: mol_type = other DNA
aactctccagct

SEQ ID NO: 46801 - DNA, 12 bp, synthetic construct
  misc_feature 1..12: note = synthetic [barcode part2]
  source 1..12: mol_type = other DNA
ctctgtacgtgt

SEQ ID NO: 46802 - DNA, 12 bp, synthetic construct
  misc_feature 1..12: note = synthetic [barcode part2]
  source 1..12: mol_type = other DNA
acgtacactctc

SEQ ID NO: 46803 - DNA, 12 bp, synthetic construct
  misc_feature 1..12: note = synthetic [barcode part2]
  source 1..12: mol_type = other DNA
ctgttgaatgtg

SEQ ID NO: 46804 - DNA, 12 bp, synthetic construct
  misc_feature 1..12: note = synthetic [barcode part2]
  source 1..12: mol_type = other DNA
acttgtagctga

SEQ ID NO: 46805 - DNA, 12 bp, synthetic construct
  misc_feature 1..12: note = synthetic [barcode part2]
  source 1..12: mol_type = other DNA
actgcgtcagca

SEQ ID NO: 46806 - DNA, 12 bp, synthetic construct
  misc_feature 1..12: note = synthetic [barcode part2]
  source 1..12: mol_type = other DNA
cagcatatgatc

SEQ ID NO: 46807 - DNA, 12 bp, synthetic construct
  misc_feature 1..12: note = synthetic [barcode part2]
  source 1..12: mol_type = other DNA
catgattcagca

SEQ ID NO: 46808 - DNA, 12 bp, synthetic construct
  misc_feature 1..12: note = synthetic [barcode part2]
  source 1..12: mol_type = other DNA
agcttagcacgc

SEQ ID NO: 46809 - DNA, 12 bp, synthetic construct
  misc_feature 1..12: note = synthetic [barcode part2]
  source 1..12: mol_type = other DNA
cattgcgagaga

SEQ ID NO: 46810 - DNA, 12 bp, synthetic construct
  misc_feature 1..12: note = synthetic [barcode part2]
  source 1..12: mol_type = other DNA
atacacggaagc

SEQ ID NO: 46811 - DNA, 12 bp, synthetic construct
  misc_feature 1..12: note = synthetic [barcode part2]
  source 1..12: mol_type = other DNA
acatggctcaat

SEQ ID NO: 46812 - DNA, 12 bp, synthetic construct
  misc_feature 1..12: note = synthetic [barcode part2]
  source 1..12: mol_type = other DNA
agccgtgctaac

SEQ ID NO: 46813 - DNA, 12 bp, synthetic construct
  misc_feature 1..12: note = synthetic [barcode part2]
  source 1..12: mol_type = other DNA
cggacgcatcat

SEQ ID NO: 46814 - DNA, 12 bp, synthetic construct
  misc_feature 1..12: note = synthetic [barcode part2]
  source 1..12: mol_type = other DNA
actactagcgta

SEQ ID NO: 46815 - DNA, 12 bp, synthetic construct
  misc_feature 1..12: note = synthetic [barcode part2]
  source 1..12: mol_type = other DNA
acgtgtagagac

SEQ ID NO: 46816 - DNA, 12 bp, synthetic construct
  misc_feature 1..12: note = synthetic [barcode part2]
  source 1..12: mol_type = other DNA
atgagccatcat

SEQ ID NO: 46817 - DNA, 12 bp, synthetic construct
  misc_feature 1..12: note = synthetic [barcode part2]
  source 1..12: mol_type = other DNA
actgtcgcgtga

SEQ ID NO: 46818 - DNA, 12 bp, synthetic construct
  misc_feature 1..12: note = synthetic [barcode part2]
  source 1..12: mol_type = other DNA
aagatgtgcgtg

SEQ ID NO: 46819 - DNA, 12 bp, synthetic construct
  misc_feature 1..12: note = synthetic [barcode part2]
  source 1..12: mol_type = other DNA
ccattgaatacg

SEQ ID NO: 46820 - DNA, 12 bp, synthetic construct
  misc_feature 1..12: note = synthetic [barcode part2]
  source 1..12: mol_type = other DNA
acttggcatgta

SEQ ID NO: 46821 - DNA, 12 bp, synthetic construct
  misc_feature 1..12: note = synthetic [barcode part2]
  source 1..12: mol_type = other DNA
ccgatgtaacta

SEQ ID NO: 46822 - DNA, 12 bp, synthetic construct
  misc_feature 1..12: note = synthetic [barcode part2]
  source 1..12: mol_type = other DNA
atcgtcggcaca

SEQ ID NO: 46823 - DNA, 12 bp, synthetic construct
  misc_feature 1..12: note = synthetic [barcode part2]
  source 1..12: mol_type = other DNA
cgcatgtcttca

SEQ ID NO: 46824 - DNA, 12 bp, synthetic construct
  misc_feature 1..12: note = synthetic [barcode part2]
  source 1..12: mol_type = other DNA
cgcgaagacata

SEQ ID NO: 46825 - DNA, 12 bp, synthetic construct
  misc_feature 1..12: note = synthetic [barcode part2]
  source 1..12: mol_type = other DNA
actgtgctaaca

SEQ ID NO: 46826 - DNA, 12 bp, synthetic construct
  misc_feature 1..12: note = synthetic [barcode part2]
  source 1..12: mol_type = other DNA
atgaatccagct

SEQ ID NO: 46827 - DNA, 12 bp, synthetic construct
  misc_feature 1..12: note = synthetic [barcode part2]
  source 1..12: mol_type = other DNA
ccgtcaagcgta

SEQ ID NO: 46828 - DNA, 12 bp, synthetic construct
  misc_feature 1..12: note = synthetic [barcode part2]
  source 1..12: mol_type = other DNA
acggattcaatc

SEQ ID NO: 46829 - DNA, 12 bp, synthetic construct
  misc_feature 1..12: note = synthetic [barcode part2]
  source 1..12: mol_type = other DNA
actgtcgataca

SEQ ID NO: 46830 - DNA, 12 bp, synthetic construct
  misc_feature 1..12: note = synthetic [barcode part2]
  source 1..12: mol_type = other DNA
ctgccgaatacg

SEQ ID NO: 46831 - DNA, 12 bp, synthetic construct
  misc_feature 1..12: note = synthetic [barcode part2]
  source 1..12: mol_type = other DNA
ccagcgtgattg

SEQ ID NO: 46832 - DNA, 12 bp, synthetic construct
  misc_feature 1..12: note = synthetic [barcode part2]
  source 1..12: mol_type = other DNA
atatggcttagc

SEQ ID NO: 46833 - DNA, 12 bp, synthetic construct
  misc_feature 1..12: note = synthetic [barcode part2]
  source 1..12: mol_type = other DNA
atgcttccacgt

SEQ ID NO: 46834 - DNA, 12 bp, synthetic construct
  misc_feature 1..12: note = synthetic [barcode part2]
  source 1..12: mol_type = other DNA
atcgtgcgctga

SEQ ID NO: 46835 - DNA, 12 bp, synthetic construct
  misc_feature 1..12: note = synthetic [barcode part2]
  source 1..12: mol_type = other DNA
actcgcatggca

SEQ ID NO: 46836 - DNA, 12 bp, synthetic construct
  misc_feature 1..12: note = synthetic [barcode part2]
  source 1..12: mol_type = other DNA
ctacgtgtcgga

SEQ ID NO: 46837 - DNA, 12 bp, synthetic construct
  misc_feature 1..12: note = synthetic [barcode part2]
  source 1..12: mol_type = other DNA
acgagccgttac

SEQ ID NO: 46838 - DNA, 12 bp, synthetic construct
  misc_feature 1..12: note = synthetic [barcode part2]
  source 1..12: mol_type = other DNA
cgcgctgaacta

SEQ ID NO: 46839 - DNA, 12 bp, synthetic construct
  misc_feature 1..12: note = synthetic [barcode part2]
  source 1..12: mol_type = other DNA
agttggctctct

SEQ ID NO: 46840 - DNA, 12 bp, synthetic construct
  misc_feature 1..12: note = synthetic [barcode part2]
  source 1..12: mol_type = other DNA
cagtgatcatac

SEQ ID NO: 46841 - DNA, 12 bp, synthetic construct
  misc_feature 1..12: note = synthetic [barcode part2]
  source 1..12: mol_type = other DNA
cggacatattgt

SEQ ID NO: 46842 - DNA, 12 bp, synthetic construct
  misc_feature 1..12: note = synthetic [barcode part2]
  source 1..12: mol_type = other DNA
acgtaacggctc

SEQ ID NO: 46843 - DNA, 12 bp, synthetic construct
  misc_feature 1..12: note = synthetic [barcode part2]
  source 1..12: mol_type = other DNA
agaatgtgcacg

SEQ ID NO: 46844 - DNA, 12 bp, synthetic construct
  misc_feature 1..12: note = synthetic [barcode part2]
  source 1..12: mol_type = other DNA
cagatgtatcac

SEQ ID NO: 46845 - DNA, 12 bp, synthetic construct
  misc_feature 1..12: note = synthetic [barcode part2]
  source 1..12: mol_type = other DNA
ctgtctccaatg

SEQ ID NO: 46846 - DNA, 12 bp, synthetic construct
  misc_feature 1..12: note = synthetic [barcode part2]
  source 1..12: mol_type = other DNA
caagcgtgttat

SEQ ID NO: 46847 - DNA, 12 bp, synthetic construct
  misc_feature 1..12: note = synthetic [barcode part2]
  source 1..12: mol_type = other DNA
actgtcggcgta

SEQ ID NO: 46848 - DNA, 12 bp, synthetic construct
  misc_feature 1..12: note = synthetic [barcode part2]
  source 1..12: mol_type = other DNA
ctcggcttcaat

SEQ ID NO: 46849 - DNA, 12 bp, synthetic construct
  misc_feature 1..12: note = synthetic [barcode part2]
  source 1..12: mol_type = other DNA
atcgccacacga

SEQ ID NO: 46850 - DNA, 12 bp, synthetic construct
  misc_feature 1..12: note = synthetic [barcode part2]
  source 1..12: mol_type = other DNA
catgagagtgca

SEQ ID NO: 46851 - DNA, 12 bp, synthetic construct
  misc_feature 1..12: note = synthetic [barcode part2]
  source 1..12: mol_type = other DNA
attgtgctgatg

SEQ ID NO: 46852 - DNA, 12 bp, synthetic construct
  misc_feature 1..12: note = synthetic [barcode part2]
  source 1..12: mol_type = other DNA
atcggctctcta

SEQ ID NO: 46853 - DNA, 12 bp, synthetic construct
  misc_feature 1..12: note = synthetic [barcode part2]
  source 1..12: mol_type = other DNA
cggatcacacgt

SEQ ID NO: 46854 - DNA, 12 bp, synthetic construct
  misc_feature 1..12: note = synthetic [barcode part2]
  source 1..12: mol_type = other DNA
cgctgtattcca

SEQ ID NO: 46855 - DNA, 12 bp, synthetic construct
  misc_feature 1..12: note = synthetic [barcode part2]
  source 1..12: mol_type = other DNA
acgcaatgattc

SEQ ID NO: 46856 - DNA, 12 bp, synthetic construct
  misc_feature 1..12: note = synthetic [barcode part2]
  source 1..12: mol_type = other DNA
acgcaatccagc

SEQ ID NO: 46857 - DNA, 12 bp, synthetic construct
  misc_feature 1..12: note = synthetic [barcode part2]
  source 1..12: mol_type = other DNA
ctggaagtagtg

SEQ ID NO: 46858 - DNA, 12 bp, synthetic construct
  misc_feature 1..12: note = synthetic [barcode part2]
  source 1..12: mol_type = other DNA
agtcacgctaat

SEQ ID NO: 46859 - DNA, 12 bp, synthetic construct
  misc_feature 1..12: note = synthetic [barcode part2]
  source 1..12: mol_type = other DNA
agtaatcgtgct

SEQ ID NO: 46860 - DNA, 12 bp, synthetic construct
  misc_feature 1..12: note = synthetic [barcode part2]
  source 1..12: mol_type = other DNA
agctatgctggc

SEQ ID NO: 46861 - DNA, 12 bp, synthetic construct
  misc_feature 1..12: note = synthetic [barcode part2]
  source 1..12: mol_type = other DNA
atctagttgcga

SEQ ID NO: 46862 - DNA, 12 bp, synthetic construct
  misc_feature 1..12: note = synthetic [barcode part2]
  source 1..12: mol_type = other DNA
caacgcaactat

SEQ ID NO: 46863 - DNA, 12 bp, synthetic construct
  misc_feature 1..12: note = synthetic [barcode part2]
  source 1..12: mol_type = other DNA
ctctaacgtcgt

SEQ ID NO: 46864 - DNA, 12 bp, synthetic construct
  misc_feature 1..12: note = synthetic [barcode part2]
  source 1..12: mol_type = other DNA
cttccagtcaac

SEQ ID NO: 46865 - DNA, 12 bp, synthetic construct
  misc_feature 1..12: note = synthetic [barcode part2]
  source 1..12: mol_type = other DNA
ctctatgtgcgt

SEQ ID NO: 46866 - DNA, 12 bp, synthetic construct
  misc_feature 1..12: note = synthetic [barcode part2]
  source 1..12: mol_type = other DNA
ctatacatcgga

SEQ ID NO: 46867 - DNA, 12 bp, synthetic construct
  misc_feature 1..12: note = synthetic [barcode part2]
  source 1..12: mol_type = other DNA
agctacactaac

SEQ ID NO: 46868 - DNA, 12 bp, synthetic construct
  misc_feature 1..12: note = synthetic [barcode part2]
  source 1..12: mol_type = other DNA
ccgcttctaaca

SEQ ID NO: 46869 - DNA, 12 bp, synthetic construct
  misc_feature 1..12: note = synthetic [barcode part2]
  source 1..12: mol_type = other DNA
cacattgagttg

SEQ ID NO: 46870 - DNA, 12 bp, synthetic construct
  misc_feature 1..12: note = synthetic [barcode part2]
  source 1..12: mol_type = other DNA
ccatcaagtatg

SEQ ID NO: 46871 - DNA, 12 bp, synthetic construct
  misc_feature 1..12: note = synthetic [barcode part2]
  source 1..12: mol_type = other DNA
acgcttcatgtc

SEQ ID NO: 46872 - DNA, 12 bp, synthetic construct
  misc_feature 1..12: note = synthetic [barcode part2]
  source 1..12: mol_type = other DNA
agtcttccagct

SEQ ID NO: 46873 - DNA, 12 bp, synthetic construct
  misc_feature 1..12: note = synthetic [barcode part2]
  source 1..12: mol_type = other DNA
atatgcggagac

SEQ ID NO: 46874 - DNA, 12 bp, synthetic construct
  misc_feature 1..12: note = synthetic [barcode part2]
  source 1..12: mol_type = other DNA
atgcgcaagagt

SEQ ID NO: 46875 - DNA, 12 bp, synthetic construct
  misc_feature 1..12: note = synthetic [barcode part2]
  source 1..12: mol_type = other DNA
acggccatcaac

SEQ ID NO: 46876 - DNA, 12 bp, synthetic construct
  misc_feature 1..12: note = synthetic [barcode part2]
  source 1..12: mol_type = other DNA
ccgaatcgcgta

SEQ ID NO: 46877 - DNA, 12 bp, synthetic construct
  misc_feature 1..12: note = synthetic [barcode part2]
  source 1..12: mol_type = other DNA
aagctggagttg

SEQ ID NO: 46878 - DNA, 12 bp, synthetic construct
  misc_feature 1..12: note = synthetic [barcode part2]
  source 1..12: mol_type = other DNA
cgccagcagtta

SEQ ID NO: 46879 - DNA, 12 bp, synthetic construct
  misc_feature 1..12: note = synthetic [barcode part2]
  source 1..12: mol_type = other DNA
catccgacaata

SEQ ID NO: 46880 - DNA, 12 bp, synthetic construct
  misc_feature 1..12: note = synthetic [barcode part2]
  source 1..12: mol_type = other DNA
catgcgtcttca

SEQ ID NO: 46881 - DNA, 12 bp, synthetic construct
  misc_feature 1..12: note = synthetic [barcode part2]
  source 1..12: mol_type = other DNA
aatcacggattc

SEQ ID NO: 46882 - DNA, 12 bp, synthetic construct
  misc_feature 1..12: note = synthetic [barcode part2]
  source 1..12: mol_type = other DNA
cgcttagcagca

SEQ ID NO: 46883 - DNA, 12 bp, synthetic construct
  misc_feature 1..12: note = synthetic [barcode part2]
  source 1..12: mol_type = other DNA
cggcgtgactat

SEQ ID NO: 46884 - DNA, 12 bp, synthetic construct
  misc_feature 1..12: note = synthetic [barcode part2]
  source 1..12: mol_type = other DNA
ctggattgcacg

SEQ ID NO: 46885 - DNA, 12 bp, synthetic construct
  misc_feature 1..12: note = synthetic [barcode part2]
  source 1..12: mol_type = other DNA
cagattgtacac

SEQ ID NO: 46886 - DNA, 12 bp, synthetic construct
  misc_feature 1..12: note = synthetic [barcode part2]
  source 1..12: mol_type = other DNA
cgttcaatggcg

SEQ ID NO: 46887 - DNA, 12 bp, synthetic construct
  misc_feature 1..12: note = synthetic [barcode part2]
  source 1..12: mol_type = other DNA
ctgacatggctg

SEQ ID NO: 46888 - DNA, 12 bp, synthetic construct
  misc_feature 1..12: note = synthetic [barcode part2]
  source 1..12: mol_type = other DNA
cagcttcagttc

SEQ ID NO: 46889 - DNA, 12 bp, synthetic construct
  misc_feature 1..12: note = synthetic [barcode part2]
  source 1..12: mol_type = other DNA
atactaagccac

SEQ ID NO: 46890 - DNA, 12 bp, synthetic construct
  misc_feature 1..12: note = synthetic [barcode part2]
  source 1..12: mol_type = other DNA
agatgtaacgcg

SEQ ID NO: 46891 - DNA, 12 bp, synthetic construct
  misc_feature 1..12: note = synthetic [barcode part2]
  source 1..12: mol_type = other DNA
atgctggcagct

SEQ ID NO: 46892 - DNA, 12 bp, synthetic construct
  misc_feature 1..12: note = synthetic [barcode part2]
  source 1..12: mol_type = other DNA
cgcaacttagta

SEQ ID NO: 46893 - DNA, 12 bp, synthetic construct
  misc_feature 1..12: note = synthetic [barcode part2]
  source 1..12: mol_type = other DNA
atgcgcagagat

SEQ ID NO: 46894 - DNA, 12 bp, synthetic construct
  misc_feature 1..12: note = synthetic [barcode part2]
  source 1..12: mol_type = other DNA
cgttgtactctg

SEQ ID NO: 46895 - DNA, 12 bp, synthetic construct
  misc_feature 1..12: note = synthetic [barcode part2]
  source 1..12: mol_type = other DNA
acttgatgcgta

SEQ ID NO: 46896 - DNA, 12 bp, synthetic construct
  misc_feature 1..12: note = synthetic [barcode part2]
  source 1..12: mol_type = other DNA
cggacatgccat

SEQ ID NO: 46897 - DNA, 12 bp, synthetic construct
  misc_feature 1..12: note = synthetic [barcode part2]
  source 1..12: mol_type = other DNA
cacaactcaatg

SEQ ID NO: 46898 - DNA, 12 bp, synthetic construct
  misc_feature 1..12: note = synthetic [barcode part2]
  source 1..12: mol_type = other DNA
ctagagatggca

SEQ ID NO: 46899 - DNA, 12 bp, synthetic construct
  misc_feature 1..12: note = synthetic [barcode part2]
  source 1..12: mol_type = other DNA
ctgcaattctcg

SEQ ID NO: 46900 - DNA, 12 bp, synthetic construct
  misc_feature 1..12: note = synthetic [barcode part2]
  source 1..12: mol_type = other DNA
atccgacgtgca

SEQ ID NO: 46901 - DNA, 12 bp, synthetic construct
  misc_feature 1..12: note = synthetic [barcode part2]
  source 1..12: mol_type = other DNA
ctcttagccgat

SEQ ID NO: 46902 - DNA, 12 bp, synthetic construct
  misc_feature 1..12: note = synthetic [barcode part2]
  source 1..12: mol_type = other DNA
cgcacatgaaga

SEQ ID NO: 46903 - DNA, 12 bp, synthetic construct
  misc_feature 1..12: note = synthetic [barcode part2]
  source 1..12: mol_type = other DNA
cgcattgctgga

SEQ ID NO: 46904 - DNA, 12 bp, synthetic construct
  misc_feature 1..12: note = synthetic [barcode part2]
  source 1..12: mol_type = other DNA
ctactggatgta

SEQ ID NO: 46905 - DNA, 12 bp, synthetic construct
  misc_feature 1..12: note = synthetic [barcode part2]
  source 1..12: mol_type = other DNA
cgttagtagttg

SEQ ID NO: 46906 - DNA, 12 bp, synthetic construct
  misc_feature 1..12: note = synthetic [barcode part2]
  source 1..12: mol_type = other DNA
aacgagagctgt

SEQ ID NO: 46907 - DNA, 12 bp, synthetic construct
  misc_feature 1..12: note = synthetic [barcode part2]
  source 1..12: mol_type = other DNA
attacatcagcg

SEQ ID NO: 46908 - DNA, 12 bp, synthetic construct
  misc_feature 1..12: note = synthetic [barcode part2]
  source 1..12: mol_type = other DNA
ccgagttgtgca

SEQ ID NO: 46909 - DNA, 12 bp, synthetic construct
  misc_feature 1..12: note = synthetic [barcode part2]
  source 1..12: mol_type = other DNA
caagccatgtat

SEQ ID NO: 46910 - DNA, 12 bp, synthetic construct
  misc_feature 1..12: note = synthetic [barcode part2]
  source 1..12: mol_type = other DNA
cttgctgattgc

SEQ ID NO: 46911 - DNA, 12 bp, synthetic construct
  misc_feature 1..12: note = synthetic [barcode part2]
  source 1..12: mol_type = other DNA
atgctcttgcgt

SEQ ID NO: 46912 - DNA, 12 bp, synthetic construct
  misc_feature 1..12: note = synthetic [barcode part2]
  source 1..12: mol_type = other DNA
aacagagcgact

SEQ ID NO: 46913 - DNA, 12 bp, synthetic construct
  misc_feature 1..12: note = synthetic [barcode part2]
  source 1..12: mol_type = other DNA
catggcttagta

SEQ ID NO: 46914 - DNA, 12 bp, synthetic construct
  misc_feature 1..12: note = synthetic [barcode part2]
  source 1..12: mol_type = other DNA
agcgattacatc

SEQ ID NO: 46915 - DNA, 12 bp, synthetic construct
  misc_feature 1..12: note = synthetic [barcode part2]
  source 1..12: mol_type = other DNA
catgctgctgga

SEQ ID NO: 46916 - DNA, 12 bp, synthetic construct
  misc_feature 1..12: note = synthetic [barcode part2]
  source 1..12: mol_type = other DNA
ctcttccgaagt

SEQ ID NO: 46917 - DNA, 12 bp, synthetic construct
  misc_feature 1..12: note = synthetic [barcode part2]
  source 1..12: mol_type = other DNA
aagaactagccg

SEQ ID NO: 46918 - DNA, 12 bp, synthetic construct
  misc_feature 1..12: note = synthetic [barcode part2]
  source 1..12: mol_type = other DNA
agatatggcacg

SEQ ID NO: 46919 - DNA, 12 bp, synthetic construct
  misc_feature 1..12: note = synthetic [barcode part2]
  source 1..12: mol_type = other DNA
aagcaattggcg

SEQ ID NO: 46920 - DNA, 12 bp, synthetic construct
  misc_feature 1..12: note = synthetic [barcode part2]
  source 1..12: mol_type = other DNA
cgtctaatgatg

SEQ ID NO: 46921 - DNA, 12 bp, synthetic construct
  misc_feature 1..12: note = synthetic [barcode part2]
  source 1..12: mol_type = other DNA
ctcgtcgtaact

SEQ ID NO: 46922 - DNA, 12 bp, synthetic construct
  misc_feature 1..12: note = synthetic [barcode part2]
  source 1..12: mol_type = other DNA
catgtcgccaga

SEQ ID NO: 46923 - DNA, 12 bp, synthetic construct
  misc_feature 1..12: note = synthetic [barcode part2]
  source 1..12: mol_type = other DNA
cttcttcagagc

SEQ ID NO: 46924 - DNA, 12 bp, synthetic construct
  misc_feature 1..12: note = synthetic [barcode part2]
  source 1..12: mol_type = other DNA
cgtctggcaatg

SEQ ID NO: 46925 - DNA, 12 bp, synthetic construct
  misc_feature 1..12: note = synthetic [barcode part2]
  source 1..12: mol_type = other DNA
acagcgtgagat

SEQ ID NO: 46926 - DNA, 12 bp, synthetic construct
  misc_feature 1..12: note = synthetic [barcode part2]
  source 1..12: mol_type = other DNA
ccgtagttctca

SEQ ID NO: 46927 - DNA, 12 bp, synthetic construct
  misc_feature 1..12: note = synthetic [barcode part2]
  source 1..12: mol_type = other DNA
actgctgacgca

SEQ ID NO: 46928 - DNA, 12 bp, synthetic construct
  misc_feature 1..12: note = synthetic [barcode part2]
  source 1..12: mol_type = other DNA
cgctcaataaca

SEQ ID NO: 46929 - DNA, 12 bp, synthetic construct
  misc_feature 1..12: note = synthetic [barcode part2]
  source 1..12: mol_type = other DNA
actcgtgtgata

SEQ ID NO: 46930 - DNA, 12 bp, synthetic construct
  misc_feature 1..12: note = synthetic [barcode part2]
  source 1..12: mol_type = other DNA
atgaacttggct

SEQ ID NO: 46931 - DNA, 12 bp, synthetic construct
  misc_feature 1..12: note = synthetic [barcode part2]
  source 1..12: mol_type = other DNA
atgccagatcat

SEQ ID NO: 46932 - DNA, 12 bp, synthetic construct
  misc_feature 1..12: note = synthetic [barcode part2]
  source 1..12: mol_type = other DNA
ctatcggataca

SEQ ID NO: 46933 - DNA, 12 bp, synthetic construct
  misc_feature 1..12: note = synthetic [barcode part2]
  source 1..12: mol_type = other DNA
cgtaacttgatg

SEQ ID NO: 46934 - DNA, 12 bp, synthetic construct
  misc_feature 1..12: note = synthetic [barcode part2]
  source 1..12: mol_type = other DNA
cgatcaagaagc

SEQ ID NO: 46935 - DNA, 12 bp, synthetic construct
  misc_feature 1..12: note = synthetic [barcode part2]
  source 1..12: mol_type = other DNA
acgcagcagttc

SEQ ID NO: 46936 - DNA, 12 bp, synthetic construct
  misc_feature 1..12: note = synthetic [barcode part2]
  source 1..12: mol_type = other DNA
ctcatcatggct

SEQ ID NO: 46937 - DNA, 12 bp, synthetic construct
  misc_feature 1..12: note = synthetic [barcode part2]
  source 1..12: mol_type = other DNA
actgcactggca

SEQ ID NO: 46938 - DNA, 12 bp, synthetic construct
  misc_feature 1..12: note = synthetic [barcode part2]
  source 1..12: mol_type = other DNA
aatcagcgagac

SEQ ID NO: 46939 - DNA, 12 bp, synthetic construct
  misc_feature 1..12: note = synthetic [barcode part2]
  source 1..12: mol_type = other DNA
cgccaatgatta

SEQ ID NO: 46940 - DNA, 12 bp, synthetic construct
  misc_feature 1..12: note = synthetic [barcode part2]
  source 1..12: mol_type = other DNA
aagtacagcacg

SEQ ID NO: 46941 - DNA, 12 bp, synthetic construct
  misc_feature 1..12: note = synthetic [barcode part2]
  source 1..12: mol_type = other DNA
agagctgtaacg

SEQ ID NO: 46942 - DNA, 12 bp, synthetic construct
  misc_feature 1..12: note = synthetic [barcode part2]
  source 1..12: mol_type = other DNA
cttgcactatgc

SEQ ID NO: 46943 - DNA, 12 bp, synthetic construct
  misc_feature 1..12: note = synthetic [barcode part2]
  source 1..12: mol_type = other DNA
actatcaacgca

SEQ ID NO: 46944 - DNA, 12 bp, synthetic construct
  misc_feature 1..12: note = synthetic [barcode part2]
  source 1..12: mol_type = other DNA
ccactaagtgcg

SEQ ID NO: 46945 - DNA, 12 bp, synthetic construct
  misc_feature 1..12: note = synthetic [barcode part2]
  source 1..12: mol_type = other DNA
ctgacataatcg

SEQ ID NO: 46946 - DNA, 12 bp, synthetic construct
  misc_feature 1..12: note = synthetic [barcode part2]
  source 1..12: mol_type = other DNA
agcgtgcgattc

SEQ ID NO: 46947 - DNA, 12 bp, synthetic construct
  misc_feature 1..12: note = synthetic [barcode part2]
  source 1..12: mol_type = other DNA
cgagcacattgc

SEQ ID NO: 46948 - DNA, 12 bp, synthetic construct
  misc_feature 1..12: note = synthetic [barcode part2]
  source 1..12: mol_type = other DNA
ccgagttacata

SEQ ID NO: 46949 - DNA, 12 bp, synthetic construct
  misc_feature 1..12: note = synthetic [barcode part2]
  source 1..12: mol_type = other DNA
cagtgatacatc

SEQ ID NO: 46950 - DNA, 12 bp, synthetic construct
  misc_feature 1..12: note = synthetic [barcode part2]
  source 1..12: mol_type = other DNA
ctccatacgcat

SEQ ID NO: 46951 - DNA, 12 bp, synthetic construct
  misc_feature 1..12: note = synthetic [barcode part2]
  source 1..12: mol_type = other DNA
ctatggcttcca

SEQ ID NO: 46952 - DNA, 12 bp, synthetic construct
  misc_feature 1..12: note = synthetic [barcode part2]
  source 1..12: mol_type = other DNA
aagtatggcgtg

SEQ ID NO: 46953 - DNA, 12 bp, synthetic construct
  misc_feature 1..12: note = synthetic [barcode part2]
  source 1..12: mol_type = other DNA
ctgttgagcacg

SEQ ID NO: 46954 - DNA, 12 bp, synthetic construct
  misc_feature 1..12: note = synthetic [barcode part2]
  source 1..12: mol_type = other DNA
caatggccgtgt

SEQ ID NO: 46955 - DNA, 12 bp, synthetic construct
  misc_feature 1..12: note = synthetic [barcode part2]
  source 1..12: mol_type = other DNA
ctagctgcttca

SEQ ID NO: 46956 - DNA, 12 bp, synthetic construct
  misc_feature 1..12: note = synthetic [barcode part2]
  source 1..12: mol_type = other DNA
catactaagcca

SEQ ID NO: 46957 - DNA, 12 bp, synthetic construct
  misc_feature 1..12: note = synthetic [barcode part2]
  source 1..12: mol_type = other DNA
agagtgcacatg

SEQ ID NO: 46958 - DNA, 12 bp, synthetic construct
  misc_feature 1..12: note = synthetic [barcode part2]
  source 1..12: mol_type = other DNA
ccaagttatgtg

SEQ ID NO: 46959 - DNA, 12 bp, synthetic construct
  misc_feature 1..12: note = synthetic [barcode part2]
  source 1..12: mol_type = other DNA
cggcatataact

SEQ ID NO: 46960 - DNA, 12 bp, synthetic construct
  misc_feature 1..12: note = synthetic [barcode part2]
  source 1..12: mol_type = other DNA
ctgaactacgcg

SEQ ID NO: 46961 - DNA, 12 bp, synthetic construct
  misc_feature 1..12: note = synthetic [barcode part2]
  source 1..12: mol_type = other DNA
atccacgtaaca

SEQ ID NO: 46962 - DNA, 12 bp, synthetic construct
  misc_feature 1..12: note = synthetic [barcode part2]
  source 1..12: mol_type = other DNA
atggaagcgtgt

SEQ ID NO: 46963 - DNA, 12 bp, synthetic construct
  misc_feature 1..12: note = synthetic [barcode part2]
  source 1..12: mol_type = other DNA
cgttcaacaatg

SEQ ID NO: 46964 - DNA, 12 bp, synthetic construct
  misc_feature 1..12: note = synthetic [barcode part2]
  source 1..12: mol_type = other DNA
attgcgttaacg

SEQ ID NO: 46965 - DNA, 12 bp, synthetic construct
  misc_feature 1..12: note = synthetic [barcode part2]
  source 1..12: mol_type = other DNA
atgcttcacgct

SEQ ID NO: 46966 - DNA, 12 bp, synthetic construct
  misc_feature 1..12: note = synthetic [barcode part2]
  source 1..12: mol_type = other DNA
ctagcacggcta

SEQ ID NO: 46967 - DNA, 12 bp, synthetic construct
  misc_feature 1..12: note = synthetic [barcode part2]
  source 1..12: mol_type = other DNA
cgcagttcagca

SEQ ID NO: 46968 - DNA, 12 bp, synthetic construct
  misc_feature 1..12: note = synthetic [barcode part2]
  source 1..12: mol_type = other DNA
actgtatgctga

SEQ ID NO: 46969 - DNA, 12 bp, synthetic construct
  misc_feature 1..12: note = synthetic [barcode part2]
  source 1..12: mol_type = other DNA
cgctagttcgga

SEQ ID NO: 46970 - DNA, 12 bp, synthetic construct
  misc_feature 1..12: note = synthetic [barcode part2]
  source 1..12: mol_type = other DNA
cagcatagtcgc

SEQ ID NO: 46971 - DNA, 12 bp, synthetic construct
  misc_feature 1..12: note = synthetic [barcode part2]
  source 1..12: mol_type = other DNA
cgcttccgtata

SEQ ID NO: 46972 - DNA, 12 bp, synthetic construct
  misc_feature 1..12: note = synthetic [barcode part2]
  source 1..12: mol_type = other DNA
catgaagacgca

SEQ ID NO: 46973 - DNA, 12 bp, synthetic construct
  misc_feature 1..12: note = synthetic [barcode part2]
  source 1..12: mol_type = other DNA
catagagtgcga

SEQ ID NO: 46974 - DNA, 12 bp, synthetic construct
  misc_feature 1..12: note = synthetic [barcode part2]
  source 1..12: mol_type = other DNA
aattacactggc

SEQ ID NO: 46975 - DNA, 12 bp, synthetic construct
  misc_feature 1..12: note = synthetic [barcode part2]
  source 1..12: mol_type = other DNA
atcacatcgaca

SEQ ID NO: 46976 - DNA, 12 bp, synthetic construct
  misc_feature 1..12: note = synthetic [barcode part2]
  source 1..12: mol_type = other DNA
acttgatcgtga

SEQ ID NO: 46977 - DNA, 12 bp, synthetic construct
  misc_feature 1..12: note = synthetic [barcode part2]
  source 1..12: mol_type = other DNA
agagccatagtg

SEQ ID NO: 46978 - DNA, 12 bp, synthetic construct
  misc_feature 1..12: note = synthetic [barcode part2]
  source 1..12: mol_type = other DNA
cacgctggattg

SEQ ID NO: 46979 - DNA, 12 bp, synthetic construct
  misc_feature 1..12: note = synthetic [barcode part2]
  source 1..12: mol_type = other DNA
agaagagcttcg

SEQ ID NO: 46980 - DNA, 12 bp, synthetic construct
  misc_feature 1..12: note = synthetic [barcode part2]
  source 1..12: mol_type = other DNA
ccgtagtctcta

SEQ ID NO: 46981 - DNA, 12 bp, synthetic construct
  misc_feature 1..12: note = synthetic [barcode part2]
  source 1..12: mol_type = other DNA
ccgtcaacgtga

SEQ ID NO: 46982 - DNA, 12 bp, synthetic construct
  misc_feature 1..12: note = synthetic [barcode part2]
  source 1..12: mol_type = other DNA
ctgagccatgtg

SEQ ID NO: 46983 - DNA, 12 bp, synthetic construct
  misc_feature 1..12: note = synthetic [barcode part2]
  source 1..12: mol_type = other DNA
agatgattggcg

SEQ ID NO: 46984 - DNA, 12 bp, synthetic construct
  misc_feature 1..12: note = synthetic [barcode part2]
  source 1..12: mol_type = other DNA
attactagtgcg

SEQ ID NO: 46985 - DNA, 12 bp, synthetic construct
  misc_feature 1..12: note = synthetic [barcode part2]
  source 1..12: mol_type = other DNA
cagatacattgc

SEQ ID NO: 46986 - DNA, 12 bp, synthetic construct
  misc_feature 1..12: note = synthetic [barcode part2]
  source 1..12: mol_type = other DNA
atctaacacgca

SEQ ID NO: 46987 - DNA, 12 bp, synthetic construct
  misc_feature 1..12: note = synthetic [barcode part2]
  source 1..12: mol_type = other DNA
acatcaatggct

SEQ ID NO: 46988 - DNA, 12 bp, synthetic construct
  misc_feature 1..12: note = synthetic [barcode part2]
  source 1..12: mol_type = other DNA
ctgagttatacg

SEQ ID NO: 46989 - DNA, 12 bp, synthetic construct
  misc_feature 1..12: note = synthetic [barcode part2]
  source 1..12: mol_type = other DNA
agcggcttatgc

SEQ ID NO: 46990 - DNA, 12 bp, synthetic construct
  misc_feature 1..12: note = synthetic [barcode part2]
  source 1..12: mol_type = other DNA
ctgctctcaatg

SEQ ID NO: 46991 - DNA, 12 bp, synthetic construct
  misc_feature 1..12: note = synthetic [barcode part2]
  source 1..12: mol_type = other DNA
ccggattacgca

SEQ ID NO: 46992 - DNA, 12 bp, synthetic construct
  misc_feature 1..12: note = synthetic [barcode part2]
  source 1..12: mol_type = other DNA
agcgtgcttgac

SEQ ID NO: 46993 - DNA, 12 bp, synthetic construct
  misc_feature 1..12: note = synthetic [barcode part2]
  source 1..12: mol_type = other DNA
atcacgctaaca

SEQ ID NO: 46994 - DNA, 12 bp, synthetic construct
  misc_feature 1..12: note = synthetic [barcode part2]
  source 1..12: mol_type = other DNA
ccgtgtagatta

SEQ ID NO: 46995 - DNA, 12 bp, synthetic construct
  misc_feature 1..12: note = synthetic [barcode part2]
  source 1..12: mol_type = other DNA
cggatgttggct

SEQ ID NO: 46996 - DNA, 12 bp, synthetic construct
  misc_feature 1..12: note = synthetic [barcode part2]
  source 1..12: mol_type = other DNA
acactctcacgt

SEQ ID NO: 46997 - DNA, 12 bp, synthetic construct
  misc_feature 1..12: note = synthetic [barcode part2]
  source 1..12: mol_type = other DNA
ccgatcactcta

SEQ ID NO: 46998 - DNA, 12 bp, synthetic construct
  misc_feature 1..12: note = synthetic [barcode part2]
  source 1..12: mol_type = other DNA
cattgatccaga

SEQ ID NO: 46999 - DNA, 12 bp, synthetic construct
  misc_feature 1..12: note = synthetic [barcode part2]
  source 1..12: mol_type = other DNA
atgccagcgact

SEQ ID NO: 47000 - DNA, 12 bp, synthetic construct
  misc_feature 1..12: note = synthetic [barcode part2]
  source 1..12: mol_type = other DNA
acattgagccat

SEQ ID NO: 47001 - DNA, 12 bp, synthetic construct
  misc_feature 1..12: note = synthetic [barcode part2]
  source 1..12: mol_type = other DNA
ccgcataagtta

SEQ ID NO: 47002 - DNA, 12 bp, synthetic construct
  misc_feature 1..12: note = synthetic [barcode part2]
  source 1..12: mol_type = other DNA
cttgttagtcgc

SEQ ID NO: 47003 - DNA, 12 bp, synthetic construct
  misc_feature 1..12: note = synthetic [barcode part2]
  source 1..12: mol_type = other DNA
caacagccgcat

SEQ ID NO: 47004 - DNA, 12 bp, synthetic construct
  misc_feature 1..12: note = synthetic [barcode part2]
  source 1..12: mol_type = other DNA
aacaatccacgt

SEQ ID NO: 47005 - DNA, 12 bp, synthetic construct
  misc_feature 1..12: note = synthetic [barcode part2]
  source 1..12: mol_type = other DNA
atggcacagagt

SEQ ID NO: 47006 - DNA, 12 bp, synthetic construct
  misc_feature 1..12: note = synthetic [barcode part2]
  source 1..12: mol_type = other DNA
ccacttccaatg

SEQ ID NO: 47007 - DNA, 12 bp, synthetic construct
  misc_feature 1..12: note = synthetic [barcode part2]
  source 1..12: mol_type = other DNA
acactaacagct

SEQ ID NO: 47008 - DNA, 12 bp, synthetic construct
  misc_feature 1..12: note = synthetic [barcode part2]
  source 1..12: mol_type = other DNA
ctctagttggct

SEQ ID NO: 47009 - DNA, 12 bp, synthetic construct
  misc_feature 1..12: note = synthetic [barcode part2]
  source 1..12: mol_type = other DNA
actagccgaaga

SEQ ID NO: 47010 - DNA, 12 bp, synthetic construct
  misc_feature 1..12: note = synthetic [barcode part2]
  source 1..12: mol_type = other DNA
agaagccaatcg

SEQ ID NO: 47011 - DNA, 12 bp, synthetic construct
  misc_feature 1..12: note = synthetic [barcode part2]
  source 1..12: mol_type = other DNA
actgaagagcca

SEQ ID NO: 47012 - DNA, 12 bp, synthetic construct
  misc_feature 1..12: note = synthetic [barcode part2]
  source 1..12: mol_type = other DNA
atctgcgcgaca

SEQ ID NO: 47013 - DNA, 12 bp, synthetic construct
  misc_feature 1..12: note = synthetic [barcode part2]
  source 1..12: mol_type = other DNA
cgtggctcaatg

SEQ ID NO: 47014 - DNA, 12 bp, synthetic construct
  misc_feature 1..12: note = synthetic [barcode part2]
  source 1..12: mol_type = other DNA
agccgtgaactc

SEQ ID NO: 47015 - DNA, 12 bp, synthetic construct
  misc_feature 1..12: note = synthetic [barcode part2]
  source 1..12: mol_type = other DNA
cagttgactctc

SEQ ID NO: 47016 - DNA, 12 bp, synthetic construct
  misc_feature 1..12: note = synthetic [barcode part2]
  source 1..12: mol_type = other DNA
actcagcgcgta

SEQ ID NO: 47017 - DNA, 12 bp, synthetic construct
  misc_feature 1..12: note = synthetic [barcode part2]
  source 1..12: mol_type = other DNA
cagtacagccac

SEQ ID NO: 47018 - DNA, 12 bp, synthetic construct
  misc_feature 1..12: note = synthetic [barcode part2]
  source 1..12: mol_type = other DNA
agacgtgatacg

SEQ ID NO: 47019 - DNA, 12 bp, synthetic construct
  misc_feature 1..12: note = synthetic [barcode part2]
  source 1..12: mol_type = other DNA
actcacgtagta

SEQ ID NO: 47020 - DNA, 12 bp, synthetic construct
  misc_feature 1..12: note = synthetic [barcode part2]
  source 1..12: mol_type = other DNA
cgttacattccg

SEQ ID NO: 47021 - DNA, 12 bp, synthetic construct
  misc_feature 1..12: note = synthetic [barcode part2]
  source 1..12: mol_type = other DNA
aatggctcgtgc

SEQ ID NO: 47022 - DNA, 12 bp, synthetic construct
  misc_feature 1..12: note = synthetic [barcode part2]
  source 1..12: mol_type = other DNA
cgattagctctc

SEQ ID NO: 47023 - DNA, 12 bp, synthetic construct
  misc_feature 1..12: note = synthetic [barcode part2]
  source 1..12: mol_type = other DNA
atacagcgattc

SEQ ID NO: 47024 - DNA, 12 bp, synthetic construct
  misc_feature 1..12: note = synthetic [barcode part2]
  source 1..12: mol_type = other DNA
agagcgtatacg

SEQ ID NO: 47025 - DNA, 12 bp, synthetic construct
  misc_feature 1..12: note = synthetic [barcode part2]
  source 1..12: mol_type = other DNA
acttcggctcta

SEQ ID NO: 47026 - DNA, 12 bp, synthetic construct
  misc_feature 1..12: note = synthetic [barcode part2]
  source 1..12: mol_type = other DNA
atgtctctgcgt

SEQ ID NO: 47027 - DNA, 12 bp, synthetic construct
  misc_feature 1..12: note = synthetic [barcode part2]
  source 1..12: mol_type = other DNA
ccggcgtaatca

SEQ ID NO: 47028 - DNA, 12 bp, synthetic construct
  misc_feature 1..12: note = synthetic [barcode part2]
  source 1..12: mol_type = other DNA
aattgcgttagc

SEQ ID NO: 47029 - DNA, 12 bp, synthetic construct
  misc_feature 1..12: note = synthetic [barcode part2]
  source 1..12: mol_type = other DNA
catcgacaatca

SEQ ID NO: 47030 - DNA, 12 bp, synthetic construct
  misc_feature 1..12: note = synthetic [barcode part2]
  source 1..12: mol_type = other DNA
actacgccgaca

SEQ ID NO: 47031 - DNA, 12 bp, synthetic construct
  misc_feature 1..12: note = synthetic [barcode part2]
  source 1..12: mol_type = other DNA
catggctcgaca

SEQ ID NO: 47032 - DNA, 12 bp, synthetic construct
  misc_feature 1..12: note = synthetic [barcode part2]
  source 1..12: mol_type = other DNA
atgagagcgcat

SEQ ID NO: 47033 - DNA, 12 bp, synthetic construct
  misc_feature 1..12: note = synthetic [barcode part2]
  source 1..12: mol_type = other DNA
catattgtcgga

SEQ ID NO: 47034 - DNA, 12 bp, synthetic construct
  misc_feature 1..12: note = synthetic [barcode part2]
  source 1..12: mol_type = other DNA
aagactacagcg

SEQ ID NO: 47035 - DNA, 12 bp, synthetic construct
  misc_feature 1..12: note = synthetic [barcode part2]
  source 1..12: mol_type = other DNA
ctagaagcagca

SEQ ID NO: 47036 - DNA, 12 bp, synthetic construct
  misc_feature 1..12: note = synthetic [barcode part2]
  source 1..12: mol_type = other DNA
aacacgctcaat

SEQ ID NO: 47037 - DNA, 12 bp, synthetic construct
  misc_feature 1..12: note = synthetic [barcode part2]
  source 1..12: mol_type = other DNA
caacagctatgt

SEQ ID NO: 47038 - DNA, 12 bp, synthetic construct
  misc_feature 1..12: note = synthetic [barcode part2]
  source 1..12: mol_type = other DNA
atgagttgccat

SEQ ID NO: 47039 - DNA, 12 bp, synthetic construct
  misc_feature 1..12: note = synthetic [barcode part2]
  source 1..12: mol_type = other DNA
cgcgttaagcca

SEQ ID NO: 47040 - DNA, 12 bp, synthetic construct
  misc_feature 1..12: note = synthetic [barcode part2]
  source 1..12: mol_type = other DNA
ccacgcaagttg

SEQ ID NO: 47041 - DNA, 12 bp, synthetic construct
  misc_feature 1..12: note = synthetic [barcode part2]
  source 1..12: mol_type = other DNA
ctctgatgccat

SEQ ID NO: 47042 - DNA, 12 bp, synthetic construct
  misc_feature 1..12: note = synthetic [barcode part2]
  source 1..12: mol_type = other DNA
actgttagcaca

SEQ ID NO: 47043 - DNA, 12 bp, synthetic construct
  misc_feature 1..12: note = synthetic [barcode part2]
  source 1..12: mol_type = other DNA
acgtgtaagagc

SEQ ID NO: 47044 - DNA, 12 bp, synthetic construct
  misc_feature 1..12: note = synthetic [barcode part2]
  source 1..12: mol_type = other DNA
atccgcacagca

SEQ ID NO: 47045 - DNA, 12 bp, synthetic construct
  misc_feature 1..12: note = synthetic [barcode part2]
  source 1..12: mol_type = other DNA
catctctgcaca

SEQ ID NO: 47046 - DNA, 12 bp, synthetic construct
  misc_feature 1..12: note = synthetic [barcode part2]
  source 1..12: mol_type = other DNA
attacgccaatg

SEQ ID NO: 47047 - DNA, 12 bp, synthetic construct
  misc_feature 1..12: note = synthetic [barcode part2]
  source 1..12: mol_type = other DNA
cgcttagtgata

SEQ ID NO: 47048 - DNA, 12 bp, synthetic construct
  misc_feature 1..12: note = synthetic [barcode part2]
  source 1..12: mol_type = other DNA
atctgcggctga

SEQ ID NO: 47049 - DNA, 12 bp, synthetic construct
  misc_feature 1..12: note = synthetic [barcode part2]
  source 1..12: mol_type = other DNA
aataatccgtgc

SEQ ID NO: 47050 - DNA, 12 bp, synthetic construct
  misc_feature 1..12: note = synthetic [barcode part2]
  source 1..12: mol_type = other DNA
caatagttgcgt

SEQ ID NO: 47051 - DNA, 12 bp, synthetic construct
  misc_feature 1..12: note = synthetic [barcode part2]
  source 1..12: mol_type = other DNA
ccgtcggatgta

SEQ ID NO: 47052 - DNA, 12 bp, synthetic construct
  misc_feature 1..12: note = synthetic [barcode part2]
  source 1..12: mol_type = other DNA
attgctgatgtg

SEQ ID NO: 47053 - DNA, 12 bp, synthetic construct
  misc_feature 1..12: note = synthetic [barcode part2]
  source 1..12: mol_type = other DNA
cactctcacatg

SEQ ID NO: 47054 - DNA, 12 bp, synthetic construct
  misc_feature 1..12: note = synthetic [barcode part2]
  source 1..12: mol_type = other DNA
ctcggaacttct

SEQ ID NO: 47055 - DNA, 12 bp, synthetic construct
  misc_feature 1..12: note = synthetic [barcode part2]
  source 1..12: mol_type = other DNA
cagcaatgtatc

SEQ ID NO: 47056 - DNA, 12 bp, synthetic construct
  misc_feature 1..12: note = synthetic [barcode part2]
  source 1..12: mol_type = other DNA
acatcggcagct

SEQ ID NO: 47057 - DNA, 12 bp, synthetic construct
  misc_feature 1..12: note = synthetic [barcode part2]
  source 1..12: mol_type = other DNA
agcaactcgtgc

SEQ ID NO: 47058 - DNA, 12 bp, synthetic construct
  misc_feature 1..12: note = synthetic [barcode part2]
  source 1..12: mol_type = other DNA
ctgcgcagattg

SEQ ID NO: 47059 - DNA, 12 bp, synthetic construct
  misc_feature 1..12: note = synthetic [barcode part2]
  source 1..12: mol_type = other DNA
cttcgacattgc

SEQ ID NO: 47060 - DNA, 12 bp, synthetic construct
  misc_feature 1..12: note = synthetic [barcode part2]
  source 1..12: mol_type = other DNA
atcatgtcagca

SEQ ID NO: 47061 - DNA, 12 bp, synthetic construct
  misc_feature 1..12: note = synthetic [barcode part2]
  source 1..12: mol_type = other DNA
cttctctgaagc

SEQ ID NO: 47062 - DNA, 12 bp, synthetic construct
  misc_feature 1..12: note = synthetic [barcode part2]
  source 1..12: mol_type = other DNA
ccatacagattg

SEQ ID NO: 47063 - DNA, 12 bp, synthetic construct
  misc_feature 1..12: note = synthetic [barcode part2]
  source 1..12: mol_type = other DNA
cattcaagctga

SEQ ID NO: 47064 - DNA, 12 bp, synthetic construct
  misc_feature 1..12: note = synthetic [barcode part2]
  source 1..12: mol_type = other DNA
actcagccgtga

SEQ ID NO: 47065 - DNA, 12 bp, synthetic construct
  misc_feature 1..12: note = synthetic [barcode part2]
  source 1..12: mol_type = other DNA
catgtcggatta

SEQ ID NO: 47066 - DNA, 12 bp, synthetic construct
  misc_feature 1..12: note = synthetic [barcode part2]
  source 1..12: mol_type = other DNA
agctatgtcaac

SEQ ID NO: 47067 - DNA, 12 bp, synthetic construct
  misc_feature 1..12: note = synthetic [barcode part2]
  source 1..12: mol_type = other DNA
aagatacgcacg

SEQ ID NO: 47068 - DNA, 12 bp, synthetic construct
  misc_feature 1..12: note = synthetic [barcode part2]
  source 1..12: mol_type = other DNA
atccgcagtcga

SEQ ID NO: 47069 - DNA, 12 bp, synthetic construct
  misc_feature 1..12: note = synthetic [barcode part2]
  source 1..12: mol_type = other DNA
ctattgagtgca

SEQ ID NO: 47070 - DNA, 12 bp, synthetic construct
  misc_feature 1..12: note = synthetic [barcode part2]
  source 1..12: mol_type = other DNA
atgtagtccagt

SEQ ID NO: 47071 - DNA, 12 bp, synthetic construct
  misc_feature 1..12: note = synthetic [barcode part2]
  source 1..12: mol_type = other DNA
cttcacgtgtac

SEQ ID NO: 47072 - DNA, 12 bp, synthetic construct
  misc_feature 1..12: note = synthetic [barcode part2]
  source 1..12: mol_type = other DNA
cagagagtcaac

SEQ ID NO: 47073 - DNA, 12 bp, synthetic construct
  misc_feature 1..12: note = synthetic [barcode part2]
  source 1..12: mol_type = other DNA
ccattgagcgtg

SEQ ID NO: 47074 - DNA, 12 bp, synthetic construct
  misc_feature 1..12: note = synthetic [barcode part2]
  source 1..12: mol_type = other DNA
ccggattcacga

SEQ ID NO: 47075 - DNA, 12 bp, synthetic construct
  misc_feature 1..12: note = synthetic [barcode part2]
  source 1..12: mol_type = other DNA
acagcacgaagt

SEQ ID NO: 47076 - DNA, 12 bp, synthetic construct
  misc_feature 1..12: note = synthetic [barcode part2]
  source 1..12: mol_type = other DNA
acgcatagaagc

SEQ ID NO: 47077 - DNA, 12 bp, synthetic construct
  misc_feature 1..12: note = synthetic [barcode part2]
  source 1..12: mol_type = other DNA
cagctctgattc

SEQ ID NO: 47078 - DNA, 12 bp, synthetic construct
  misc_feature 1..12: note = synthetic [barcode part2]
  source 1..12: mol_type = other DNA
agagattggctg

SEQ ID NO: 47079 - DNA, 12 bp, synthetic construct
  misc_feature 1..12: note = synthetic [barcode part2]
  source 1..12: mol_type = other DNA
actactacgtga

SEQ ID NO: 47080 - DNA, 12 bp, synthetic construct
  misc_feature 1..12: note = synthetic [barcode part2]
  source 1..12: mol_type = other DNA
cgctggcgatta

SEQ ID NO: 47081 - DNA, 12 bp, synthetic construct
  misc_feature 1..12: note = synthetic [barcode part2]
  source 1..12: mol_type = other DNA
atgctctgtgct

SEQ ID NO: 47082 - DNA, 12 bp, synthetic construct
  misc_feature 1..12: note = synthetic [barcode part2]
  source 1..12: mol_type = other DNA
cgcgtcgttaga

SEQ ID NO: 47083 - DNA, 12 bp, synthetic construct
  misc_feature 1..12: note = synthetic [barcode part2]
  source 1..12: mol_type = other DNA
attcagcgtgcg

SEQ ID NO: 47084 - DNA, 12 bp, synthetic construct
  misc_feature 1..12: note = synthetic [barcode part2]
  source 1..12: mol_type = other DNA
agccaatgagac

SEQ ID NO: 47085 - DNA, 12 bp, synthetic construct
  misc_feature 1..12: note = synthetic [barcode part2]
  source 1..12: mol_type = other DNA
ctgtacaagttg

SEQ ID NO: 47086 - DNA, 12 bp, synthetic construct
  misc_feature 1..12: note = synthetic [barcode part2]
  source 1..12: mol_type = other DNA
cgcattgaatca

SEQ ID NO: 47087 - DNA, 12 bp, synthetic construct
  misc_feature 1..12: note = synthetic [barcode part2]
  source 1..12: mol_type = other DNA
catgccatcgga

SEQ ID NO: 47088 - DNA, 12 bp, synthetic construct
  misc_feature 1..12: note = synthetic [barcode part2]
  source 1..12: mol_type = other DNA
acttaacgtgca

SEQ ID NO: 47089 - DNA, 12 bp, synthetic construct
  misc_feature 1..12: note = synthetic [barcode part2]
  source 1..12: mol_type = other DNA
ctgctaagtatg

SEQ ID NO: 47090 - DNA, 12 bp, synthetic construct
  misc_feature 1..12: note = synthetic [barcode part2]
  source 1..12: mol_type = other DNA
ctgcacgaactg

SEQ ID NO: 47091 - DNA, 12 bp, synthetic construct
  misc_feature 1..12: note = synthetic [barcode part2]
  source 1..12: mol_type = other DNA
agaatacgcgtg

SEQ ID NO: 47092 - DNA, 12 bp, synthetic construct
  misc_feature 1..12: note = synthetic [barcode part2]
  source 1..12: mol_type = other DNA
caatcggcttct

SEQ ID NO: 47093 - DNA, 12 bp, synthetic construct
  misc_feature 1..12: note = synthetic [barcode part2]
  source 1..12: mol_type = other DNA
actgccagtgca

SEQ ID NO: 47094 - DNA, 12 bp, synthetic construct
  misc_feature 1..12: note = synthetic [barcode part2]
  source 1..12: mol_type = other DNA
acggctgctaac

SEQ ID NO: 47095 - DNA, 12 bp, synthetic construct
  misc_feature 1..12: note = synthetic [barcode part2]
  source 1..12: mol_type = other DNA
agcgttagagac

SEQ ID NO: 47096 - DNA, 12 bp, synthetic construct
  misc_feature 1..12: note = synthetic [barcode part2]
  source 1..12: mol_type = other DNA
atgcagctcaat

SEQ ID NO: 47097 - DNA, 12 bp, synthetic construct
  misc_feature 1..12: note = synthetic [barcode part2]
  source 1..12: mol_type = other DNA
cgcgagagtata

SEQ ID NO: 47098 - DNA, 12 bp, synthetic construct
  misc_feature 1..12: note = synthetic [barcode part2]
  source 1..12: mol_type = other DNA
acgcttctatgc

SEQ ID NO: 47099 - DNA, 12 bp, synthetic construct
  misc_feature 1..12: note = synthetic [barcode part2]
  source 1..12: mol_type = other DNA
ccggattgtata

SEQ ID NO: 47100 - DNA, 12 bp, synthetic construct
  misc_feature 1..12: note = synthetic [barcode part2]
  source 1..12: mol_type = other DNA
ctcgttagctgt

SEQ ID NO: 47101 - DNA, 12 bp, synthetic construct
  misc_feature 1..12: note = synthetic [barcode part2]
  source 1..12: mol_type = other DNA
ccgtatgaacta

SEQ ID NO: 47102 - DNA, 12 bp, synthetic construct
  misc_feature 1..12: note = synthetic [barcode part2]
  source 1..12: mol_type = other DNA
acttgtacgaca

SEQ ID NO: 47103 - DNA, 12 bp, synthetic construct
  misc_feature 1..12: note = synthetic [barcode part2]
  source 1..12: mol_type = other DNA
aagtctcttccg

SEQ ID NO: 47104 - DNA, 12 bp, synthetic construct
  misc_feature 1..12: note = synthetic [barcode part2]
  source 1..12: mol_type = other DNA
atccagctatga

SEQ ID NO: 47105 - DNA, 12 bp, synthetic construct
  misc_feature 1..12: note = synthetic [barcode part2]
  source 1..12: mol_type = other DNA
ctacttcgctga

SEQ ID NO: 47106 - DNA, 12 bp, synthetic construct
  misc_feature 1..12: note = synthetic [barcode part2]
  source 1..12: mol_type = other DNA
aacggctcacgt

SEQ ID NO: 47107 - DNA, 12 bp, synthetic construct
  misc_feature 1..12: note = synthetic [barcode part2]
  source 1..12: mol_type = other DNA
agcttgacatac

SEQ ID NO: 47108 - DNA, 12 bp, synthetic construct
  misc_feature 1..12: note = synthetic [barcode part2]
  source 1..12: mol_type = other DNA
catcgcatctca

SEQ ID NO: 47109 - DNA, 12 bp, synthetic construct
  misc_feature 1..12: note = synthetic [barcode part2]
  source 1..12: mol_type = other DNA
acagccattgat

SEQ ID NO: 47110 - DNA, 12 bp, synthetic construct
  misc_feature 1..12: note = synthetic [barcode part2]
  source 1..12: mol_type = other DNA
atcagagagcca

SEQ ID NO: 47111 - DNA, 12 bp, synthetic construct
  misc_feature 1..12: note = synthetic [barcode part2]
  source 1..12: mol_type = other DNA
actacgctagta

SEQ ID NO: 47112 - DNA, 12 bp, synthetic construct
  misc_feature 1..12: note = synthetic [barcode part2]
  source 1..12: mol_type = other DNA
ctactaacgtga

SEQ ID NO: 47113 - DNA, 12 bp, synthetic construct
  misc_feature 1..12: note = synthetic [barcode part2]
  source 1..12: mol_type = other DNA
ccaatcattccg

SEQ ID NO: 47114 - DNA, 12 bp, synthetic construct
  misc_feature 1..12: note = synthetic [barcode part2]
  source 1..12: mol_type = other DNA
atcggaactgga

SEQ ID NO: 47115 - DNA, 12 bp, synthetic construct
  misc_feature 1..12: note = synthetic [barcode part2]
  source 1..12: mol_type = other DNA
caagaagccgat

SEQ ID NO: 47116 - DNA, 12 bp, synthetic construct
  misc_feature 1..12: note = synthetic [barcode part2]
  source 1..12: mol_type = other DNA
cttgattctggc

SEQ ID NO: 47117 - DNA, 12 bp, synthetic construct
  misc_feature 1..12: note = synthetic [barcode part2]
  source 1..12: mol_type = other DNA
ctcattgcagct

SEQ ID NO: 47118 - DNA, 12 bp, synthetic construct
  misc_feature 1..12: note = synthetic [barcode part2]
  source 1..12: mol_type = other DNA
ccgaatcataca

SEQ ID NO: 47119 - DNA, 12 bp, synthetic construct
  misc_feature 1..12: note = synthetic [barcode part2]
  source 1..12: mol_type = other DNA
atctatgcagca

SEQ ID NO: 47120 - DNA, 12 bp, synthetic construct
  misc_feature 1..12: note = synthetic [barcode part2]
  source 1..12: mol_type = other DNA
ccaatacagccg

SEQ ID NO: 47121 - DNA, 12 bp, synthetic construct
  misc_feature 1..12: note = synthetic [barcode part2]
  source 1..12: mol_type = other DNA
agcactagaagc

SEQ ID NO: 47122 - DNA, 12 bp, synthetic construct
  misc_feature 1..12: note = synthetic [barcode part2]
  source 1..12: mol_type = other DNA
agcagttcacgc

SEQ ID NO: 47123 - DNA, 12 bp, synthetic construct
  misc_feature 1..12: note = synthetic [barcode part2]
  source 1..12: mol_type = other DNA
cttcaatgtcgc

SEQ ID NO: 47124 - DNA, 12 bp, synthetic construct
  misc_feature 1..12: note = synthetic [barcode part2]
  source 1..12: mol_type = other DNA
atgctggactat

SEQ ID NO: 47125 - DNA, 12 bp, synthetic construct
  misc_feature 1..12: note = synthetic [barcode part2]
  source 1..12: mol_type = other DNA
aacttccgctgt

SEQ ID NO: 47126 - DNA, 12 bp, synthetic construct
  misc_feature 1..12: note = synthetic [barcode part2]
  source 1..12: mol_type = other DNA
agcttccgttac

SEQ ID NO: 47127 - DNA, 12 bp, synthetic construct
  misc_feature 1..12: note = synthetic [barcode part2]
  source 1..12: mol_type = other DNA
cgcgttagatta

SEQ ID NO: 47128 - DNA, 12 bp, synthetic construct
  misc_feature 1..12: note = synthetic [barcode part2]
  source 1..12: mol_type = other DNA
aagtgatcagcg

SEQ ID NO: 47129 - DNA, 12 bp, synthetic construct
  misc_feature 1..12: note = synthetic [barcode part2]
  source 1..12: mol_type = other DNA
cactcaacagcg

SEQ ID NO: 47130 - DNA, 12 bp, synthetic construct
  misc_feature 1..12: note = synthetic [barcode part2]
  source 1..12: mol_type = other DNA
cggagttagagt

SEQ ID NO: 47131 - DNA, 12 bp, synthetic construct
  misc_feature 1..12: note = synthetic [barcode part2]
  source 1..12: mol_type = other DNA
cttgtcgcaatc

SEQ ID NO: 47132 - DNA, 12 bp, synthetic construct
  misc_feature 1..12: note = synthetic [barcode part2]
  source 1..12: mol_type = other DNA
cagcagcacatc

SEQ ID NO: 47133 - DNA, 12 bp, synthetic construct
  misc_feature 1..12: note = synthetic [barcode part2]
  source 1..12: mol_type = other DNA
agcatacaactc

SEQ ID NO: 47134 - DNA, 12 bp, synthetic construct
  misc_feature 1..12: note = synthetic [barcode part2]
  source 1..12: mol_type = other DNA
ctccacgatact

SEQ ID NO: 47135 - DNA, 12 bp, synthetic construct
  misc_feature 1..12: note = synthetic [barcode part2]
  source 1..12: mol_type = other DNA
cagcgtgattgc

SEQ ID NO: 47136 - DNA, 12 bp, synthetic construct
  misc_feature 1..12: note = synthetic [barcode part2]
  source 1..12: mol_type = other DNA
ccgacgcgatta

SEQ ID NO: 47137 - DNA, 12 bp, synthetic construct
  misc_feature 1..12: note = synthetic [barcode part2]
  source 1..12: mol_type = other DNA
aagacgcacatg

SEQ ID NO: 47138 - DNA, 12 bp, synthetic construct
  misc_feature 1..12: note = synthetic [barcode part2]
  source 1..12: mol_type = other DNA
atcgccaacgca

SEQ ID NO: 47139 - DNA, 12 bp, synthetic construct
  misc_feature 1..12: note = synthetic [barcode part2]
  source 1..12: mol_type = other DNA
actatcacacga

SEQ ID NO: 47140 - DNA, 12 bp, synthetic construct
  misc_feature 1..12: note = synthetic [barcode part2]
  source 1..12: mol_type = other DNA
ctactaagcgta

SEQ ID NO: 47141 - DNA, 12 bp, synthetic construct
  misc_feature 1..12: note = synthetic [barcode part2]
  source 1..12: mol_type = other DNA
acgttagtgatc

SEQ ID NO: 47142 - DNA, 12 bp, synthetic construct
  misc_feature 1..12: note = synthetic [barcode part2]
  source 1..12: mol_type = other DNA
ccagtgcaactg

SEQ ID NO: 47143 - DNA, 12 bp, synthetic construct
  misc_feature 1..12: note = synthetic [barcode part2]
  source 1..12: mol_type = other DNA
caagctgcatat

SEQ ID NO: 47144 - DNA, 12 bp, synthetic construct
  misc_feature 1..12: note = synthetic [barcode part2]
  source 1..12: mol_type = other DNA
attgttaacgcg

SEQ ID NO: 47145 - DNA, 12 bp, synthetic construct
  misc_feature 1..12: note = synthetic [barcode part2]
  source 1..12: mol_type = other DNA
ctaacatagcca

SEQ ID NO: 47146 - DNA, 12 bp, synthetic construct
  misc_feature 1..12: note = synthetic [barcode part2]
  source 1..12: mol_type = other DNA
cacaacttggcg

SEQ ID NO: 47147 - DNA, 12 bp, synthetic construct
  misc_feature 1..12: note = synthetic [barcode part2]
  source 1..12: mol_type = other DNA
aacggctacgct

SEQ ID NO: 47148 - DNA, 12 bp, synthetic construct
  misc_feature 1..12: note = synthetic [barcode part2]
  source 1..12: mol_type = other DNA
agcgcgtaactc

SEQ ID NO: 47149 - DNA, 12 bp, synthetic construct
  misc_feature 1..12: note = synthetic [barcode part2]
  source 1..12: mol_type = other DNA
atatgcgagagc

SEQ ID NO: 47150 - DNA, 12 bp, synthetic construct
  misc_feature 1..12: note = synthetic [barcode part2]
  source 1..12: mol_type = other DNA
ctccagctaact

SEQ ID NO: 47151 - DNA, 12 bp, synthetic construct
  misc_feature 1..12: note = synthetic [barcode part2]
  source 1..12: mol_type = other DNA
aatcgtgctggc

SEQ ID NO: 47152 - DNA, 12 bp, synthetic construct
  misc_feature 1..12: note = synthetic [barcode part2]
  source 1..12: mol_type = other DNA
catgtcgagcca

SEQ ID NO: 47153 - DNA, 12 bp, synthetic construct
  misc_feature 1..12: note = synthetic [barcode part2]
  source 1..12: mol_type = other DNA
cttaactccgac

SEQ ID NO: 47154 - DNA, 12 bp, synthetic construct
  misc_feature 1..12: note = synthetic [barcode part2]
  source 1..12: mol_type = other DNA
cttacgctgtac

SEQ ID NO: 47155 - DNA, 12 bp, synthetic construct
  misc_feature 1..12: note = synthetic [barcode part2]
  source 1..12: mol_type = other DNA
acgtggcttgac

SEQ ID NO: 47156 - DNA, 12 bp, synthetic construct
  misc_feature 1..12: note = synthetic [barcode part2]
  source 1..12: mol_type = other DNA
acagctgccgat

SEQ ID NO: 47157 - DNA, 12 bp, synthetic construct
  misc_feature 1..12: note = synthetic [barcode part2]
  source 1..12: mol_type = other DNA
acttagtcacga

SEQ ID NO: 47158 - DNA, 12 bp, synthetic construct
  misc_feature 1..12: note = synthetic [barcode part2]
  source 1..12: mol_type = other DNA
cagtagttatgc

SEQ ID NO: 47159 - DNA, 12 bp, synthetic construct
  misc_feature 1..12: note = synthetic [barcode part2]
  source 1..12: mol_type = other DNA
cattagtggcta

SEQ ID NO: 47160 - DNA, 12 bp, synthetic construct
  misc_feature 1..12: note = synthetic [barcode part2]
  source 1..12: mol_type = other DNA
cgcggcttaaca

SEQ ID NO: 47161 - DNA, 12 bp, synthetic construct
  misc_feature 1..12: note = synthetic [barcode part2]
  source 1..12: mol_type = other DNA
cttgccatagtc

SEQ ID NO: 47162 - DNA, 12 bp, synthetic construct
  misc_feature 1..12: note = synthetic [barcode part2]
  source 1..12: mol_type = other DNA
atggctgttgat

SEQ ID NO: 47163 - DNA, 12 bp, synthetic construct
  misc_feature 1..12: note = synthetic [barcode part2]
  source 1..12: mol_type = other DNA
cggattgcatat

SEQ ID NO: 47164 - DNA, 12 bp, synthetic construct
  misc_feature 1..12: note = synthetic [barcode part2]
  source 1..12: mol_type = other DNA
agtctggcatat

SEQ ID NO: 47165 - DNA, 12 bp, synthetic construct
  misc_feature 1..12: note = synthetic [barcode part2]
  source 1..12: mol_type = other DNA
cagtgcgtgatc

SEQ ID NO: 47166 - DNA, 12 bp, synthetic construct
  misc_feature 1..12: note = synthetic [barcode part2]
  source 1..12: mol_type = other DNA
cagactatgcgc

SEQ ID NO: 47167 - DNA, 12 bp, synthetic construct
  misc_feature 1..12: note = synthetic [barcode part2]
  source 1..12: mol_type = other DNA
atccgtgtggca

SEQ ID NO: 47168 - DNA, 12 bp, synthetic construct
  misc_feature 1..12: note = synthetic [barcode part2]
  source 1..12: mol_type = other DNA
atcatgtgtcga

SEQ ID NO: 47169 - DNA, 12 bp, synthetic construct
  misc_feature 1..12: note = synthetic [barcode part2]
  source 1..12: mol_type = other DNA
agttggcggaat

SEQ ID NO: 47170 - DNA, 12 bp, synthetic construct
  misc_feature 1..12: note = synthetic [barcode part2]
  source 1..12: mol_type = other DNA
agtctcttggct

SEQ ID NO: 47171 - DNA, 12 bp, synthetic construct
  misc_feature 1..12: note = synthetic [barcode part2]
  source 1..12: mol_type = other DNA
ctcgccaactat

SEQ ID NO: 47172 - DNA, 12 bp, synthetic construct
  misc_feature 1..12: note = synthetic [barcode part2]
  source 1..12: mol_type = other DNA
cactatgttccg

SEQ ID NO: 47173 - DNA, 12 bp, synthetic construct
  misc_feature 1..12: note = synthetic [barcode part2]
  source 1..12: mol_type = other DNA
aactgcgctaat

SEQ ID NO: 47174 - DNA, 12 bp, synthetic construct
  misc_feature 1..12: note = synthetic [barcode part2]
  source 1..12: mol_type = other DNA
agcaactgcgtc

SEQ ID NO: 47175 - DNA, 12 bp, synthetic construct
  misc_feature 1..12: note = synthetic [barcode part2]
  source 1..12: mol_type = other DNA
attgtgccagcg

SEQ ID NO: 47176 - DNA, 12 bp, synthetic construct
  misc_feature 1..12: note = synthetic [barcode part2]
  source 1..12: mol_type = other DNA
cgcggctattga

SEQ ID NO: 47177 - DNA, 12 bp, synthetic construct
  misc_feature 1..12: note = synthetic [barcode part2]
  source 1..12: mol_type = other DNA
cagcaatcacgc

SEQ ID NO: 47178 - DNA, 12 bp, synthetic construct
  misc_feature 1..12: note = synthetic [barcode part2]
  source 1..12: mol_type = other DNA
cgcagttgtcga

SEQ ID NO: 47179 - DNA, 12 bp, synthetic construct
  misc_feature 1..12: note = synthetic [barcode part2]
  source 1..12: mol_type = other DNA
actatacgtcga

SEQ ID NO: 47180 - DNA, 12 bp, synthetic construct
  misc_feature 1..12: note = synthetic [barcode part2]
  source 1..12: mol_type = other DNA
cagtatggctgc

SEQ ID NO: 47181 - DNA, 12 bp, synthetic construct
  misc_feature 1..12: note = synthetic [barcode part2]
  source 1..12: mol_type = other DNA
aacgcacttagt

SEQ ID NO: 47182 - DNA, 12 bp, synthetic construct
  misc_feature 1..12: note = synthetic [barcode part2]
  source 1..12: mol_type = other DNA
atatggcagttc

SEQ ID NO: 47183 - DNA, 12 bp, synthetic construct
  misc_feature 1..12: note = synthetic [barcode part2]
  source 1..12: mol_type = other DNA
agtgccaagagt

SEQ ID NO: 47184 - DNA, 12 bp, synthetic construct
  misc_feature 1..12: note = synthetic [barcode part2]
  source 1..12: mol_type = other DNA
ccaatgtagttg

SEQ ID NO: 47185 - DNA, 12 bp, synthetic construct
  misc_feature 1..12: note = synthetic [barcode part2]
  source 1..12: mol_type = other DNA
ccgttagtgcga

SEQ ID NO: 47186 - DNA, 12 bp, synthetic construct
  misc_feature 1..12: note = synthetic [barcode part2]
  source 1..12: mol_type = other DNA
agctgatgaagc

SEQ ID NO: 47187 - DNA, 12 bp, synthetic construct
  misc_feature 1..12: note = synthetic [barcode part2]
  source 1..12: mol_type = other DNA
agcacgcttagc

SEQ ID NO: 47188 - DNA, 12 bp, synthetic construct
  misc_feature 1..12: note = synthetic [barcode part2]
  source 1..12: mol_type = other DNA
cttacattgcgc

SEQ ID NO: 47189 - DNA, 12 bp, synthetic construct
  misc_feature 1..12: note = synthetic [barcode part2]
  source 1..12: mol_type = other DNA
attctctagccg

SEQ ID NO: 47190 - DNA, 12 bp, synthetic construct
  misc_feature 1..12: note = synthetic [barcode part2]
  source 1..12: mol_type = other DNA
acaagccgccat

SEQ ID NO: 47191 - DNA, 12 bp, synthetic construct
  misc_feature 1..12: note = synthetic [barcode part2]
  source 1..12: mol_type = other DNA
catgtgcttcca

SEQ ID NO: 47192 - DNA, 12 bp, synthetic construct
  misc_feature 1..12: note = synthetic [barcode part2]
  source 1..12: mol_type = other DNA
attgccagcgtg

SEQ ID NO: 47193 - DNA, 12 bp, synthetic construct
  misc_feature 1..12: note = synthetic [barcode part2]
  source 1..12: mol_type = other DNA
cactcaatgatg

SEQ ID NO: 47194 - DNA, 12 bp, synthetic construct
  misc_feature 1..12: note = synthetic [barcode part2]
  source 1..12: mol_type = other DNA
ctcgagagaagt

SEQ ID NO: 47195 - DNA, 12 bp, synthetic construct
  misc_feature 1..12: note = synthetic [barcode part2]
  source 1..12: mol_type = other DNA
atcatcagtgca

SEQ ID NO: 47196 - DNA, 12 bp, synthetic construct
  misc_feature 1..12: note = synthetic [barcode part2]
  source 1..12: mol_type = other DNA
cttgccaatcac

SEQ ID NO: 47197 - DNA, 12 bp, synthetic construct
  misc_feature 1..12: note = synthetic [barcode part2]
  source 1..12: mol_type = other DNA
ataagagtgcgc

SEQ ID NO: 47198 - DNA, 12 bp, synthetic construct
  misc_feature 1..12: note = synthetic [barcode part2]
  source 1..12: mol_type = other DNA
agctgtattagc

SEQ ID NO: 47199 - DNA, 12 bp, synthetic construct
  misc_feature 1..12: note = synthetic [barcode part2]
  source 1..12: mol_type = other DNA
agtccagcgcat

SEQ ID NO: 47200 - DNA, 12 bp, synthetic construct
  misc_feature 1..12: note = synthetic [barcode part2]
  source 1..12: mol_type = other DNA
cactagtagccg

SEQ ID NO: 47201 - DNA, 12 bp, synthetic construct
  misc_feature 1..12: note = synthetic [barcode part2]
  source 1..12: mol_type = other DNA
aatcacgccagc

SEQ ID NO: 47202 - DNA, 12 bp, synthetic construct
  misc_feature 1..12: note = synthetic [barcode part2]
  source 1..12: mol_type = other DNA
aattcaacgtgc

SEQ ID NO: 47203 - DNA, 12 bp, synthetic construct
  misc_feature 1..12: note = synthetic [barcode part2]
  source 1..12: mol_type = other DNA
cgtctctgtatg

SEQ ID NO: 47204 - DNA, 12 bp, synthetic construct
  misc_feature 1..12: note = synthetic [barcode part2]
  source 1..12: mol_type = other DNA
aatgcgtggctc

SEQ ID NO: 47205 - DNA, 12 bp, synthetic construct
  misc_feature 1..12: note = synthetic [barcode part2]
  source 1..12: mol_type = other DNA
cagtgtacaatc

SEQ ID NO: 47206 - DNA, 12 bp, synthetic construct
  misc_feature 1..12: note = synthetic [barcode part2]
  source 1..12: mol_type = other DNA
actcagcataca

SEQ ID NO: 47207 - DNA, 12 bp, synthetic construct
  misc_feature 1..12: note = synthetic [barcode part2]
  source 1..12: mol_type = other DNA
acttagtacgca

SEQ ID NO: 47208 - DNA, 12 bp, synthetic construct
  misc_feature 1..12: note = synthetic [barcode part2]
  source 1..12: mol_type = other DNA
ccgtatgtcgga

SEQ ID NO: 47209 - DNA, 12 bp, synthetic construct
  misc_feature 1..12: note = synthetic [barcode part2]
  source 1..12: mol_type = other DNA
caacatagctgt

SEQ ID NO: 47210 - DNA, 12 bp, synthetic construct
  misc_feature 1..12: note = synthetic [barcode part2]
  source 1..12: mol_type = other DNA
atagtcgccagc

SEQ ID NO: 47211 - DNA, 12 bp, synthetic construct
  misc_feature 1..12: note = synthetic [barcode part2]
  source 1..12: mol_type = other DNA
caagtatgccat

SEQ ID NO: 47212 - DNA, 12 bp, synthetic construct
  misc_feature 1..12: note = synthetic [barcode part2]
  source 1..12: mol_type = other DNA
cgcatactctca

SEQ ID NO: 47213 - DNA, 12 bp, synthetic construct
  misc_feature 1..12: note = synthetic [barcode part2]
  source 1..12: mol_type = other DNA
cagattggcgtc

SEQ ID NO: 47214 - DNA, 12 bp, synthetic construct
  misc_feature 1..12: note = synthetic [barcode part2]
  source 1..12: mol_type = other DNA
atctcggcttca

SEQ ID NO: 47215 - DNA, 12 bp, synthetic construct
  misc_feature 1..12: note = synthetic [barcode part2]
  source 1..12: mol_type = other DNA
aatctaacgcac

SEQ ID NO: 47216 - DNA, 12 bp, synthetic construct
  misc_feature 1..12: note = synthetic [barcode part2]
  source 1..12: mol_type = other DNA
ctacacgttaga

SEQ ID NO: 47217 - DNA, 12 bp, synthetic construct
  misc_feature 1..12: note = synthetic [barcode part2]
  source 1..12: mol_type = other DNA
ccgaatccgtga

SEQ ID NO: 47218 - DNA, 12 bp, synthetic construct
  misc_feature 1..12: note = synthetic [barcode part2]
  source 1..12: mol_type = other DNA
cagcgcaatcac

SEQ ID NO: 47219 - DNA, 12 bp, synthetic construct
  misc_feature 1..12: note = synthetic [barcode part2]
  source 1..12: mol_type = other DNA
acatctccacgt

SEQ ID NO: 47220 - DNA, 12 bp, synthetic construct
  misc_feature 1..12: note = synthetic [barcode part2]
  source 1..12: mol_type = other DNA
atctggcataca

SEQ ID NO: 47221 - DNA, 12 bp, synthetic construct
  misc_feature 1..12: note = synthetic [barcode part2]
  source 1..12: mol_type = other DNA
agtgccagagat

SEQ ID NO: 47222 - DNA, 12 bp, synthetic construct
  misc_feature 1..12: note = synthetic [barcode part2]
  source 1..12: mol_type = other DNA
ctgatgtagccg

SEQ ID NO: 47223 - DNA, 12 bp, synthetic construct
  misc_feature 1..12: note = synthetic [barcode part2]
  source 1..12: mol_type = other DNA
cgagccaatgtc

SEQ ID NO: 47224 - DNA, 12 bp, synthetic construct
  misc_feature 1..12: note = synthetic [barcode part2]
  source 1..12: mol_type = other DNA
ctacacgagtta

SEQ ID NO: 47225 - DNA, 12 bp, synthetic construct
  misc_feature 1..12: note = synthetic [barcode part2]
  source 1..12: mol_type = other DNA
cacaatctgatg

SEQ ID NO: 47226 - DNA, 12 bp, synthetic construct
  misc_feature 1..12: note = synthetic [barcode part2]
  source 1..12: mol_type = other DNA
aacttgacgtgt

SEQ ID NO: 47227 - DNA, 12 bp, synthetic construct
  misc_feature 1..12: note = synthetic [barcode part2]
  source 1..12: mol_type = other DNA
acagtcgctaat

SEQ ID NO: 47228 - DNA, 12 bp, synthetic construct
  misc_feature 1..12: note = synthetic [barcode part2]
  source 1..12: mol_type = other DNA
actcgacgtata

SEQ ID NO: 47229 - DNA, 12 bp, synthetic construct
  misc_feature 1..12: note = synthetic [barcode part2]
  source 1..12: mol_type = other DNA
ccgtctctagta

SEQ ID NO: 47230 - DNA, 12 bp, synthetic construct
  misc_feature 1..12: note = synthetic [barcode part2]
  source 1..12: mol_type = other DNA
agagtatacgcg

SEQ ID NO: 47231 - DNA, 12 bp, synthetic construct
  misc_feature 1..12: note = synthetic [barcode part2]
  source 1..12: mol_type = other DNA
acaagagcgtgt

SEQ ID NO: 47232 - DNA, 12 bp, synthetic construct
  misc_feature 1..12: note = synthetic [barcode part2]
  source 1..12: mol_type = other DNA
atcagccagaga

SEQ ID NO: 47233 - DNA, 12 bp, synthetic construct
  misc_feature 1..12: note = synthetic [barcode part2]
  source 1..12: mol_type = other DNA
cgctacatctca

SEQ ID NO: 47234 - DNA, 12 bp, synthetic construct
  misc_feature 1..12: note = synthetic [barcode part2]
  source 1..12: mol_type = other DNA
cactggcaactg

SEQ ID NO: 47235 - DNA, 12 bp, synthetic construct
  misc_feature 1..12: note = synthetic [barcode part2]
  source 1..12: mol_type = other DNA
agttatgccagt

SEQ ID NO: 47236 - DNA, 12 bp, synthetic construct
  misc_feature 1..12: note = synthetic [barcode part2]
  source 1..12: mol_type = other DNA
cagacgcgttac

SEQ ID NO: 47237 - DNA, 12 bp, synthetic construct
  misc_feature 1..12: note = synthetic [barcode part2]
  source 1..12: mol_type = other DNA
ccggaagcaata

SEQ ID NO: 47238 - DNA, 12 bp, synthetic construct
  misc_feature 1..12: note = synthetic [barcode part2]
  source 1..12: mol_type = other DNA
ctagcacaatca

SEQ ID NO: 47239 - DNA, 12 bp, synthetic construct
  misc_feature 1..12: note = synthetic [barcode part2]
  source 1..12: mol_type = other DNA
agtagccgcact

SEQ ID NO: 47240 - DNA, 12 bp, synthetic construct
  misc_feature 1..12: note = synthetic [barcode part2]
  source 1..12: mol_type = other DNA
agcgagagttac

SEQ ID NO: 47241 - DNA, 12 bp, synthetic construct
  misc_feature 1..12: note = synthetic [barcode part2]
  source 1..12: mol_type = other DNA
ctgctggacatg

SEQ ID NO: 47242 - DNA, 12 bp, synthetic construct
  misc_feature 1..12: note = synthetic [barcode part2]
  source 1..12: mol_type = other DNA
ctacgcactgga

SEQ ID NO: 47243 - DNA, 12 bp, synthetic construct
  misc_feature 1..12: note = synthetic [barcode part2]
  source 1..12: mol_type = other DNA
atcatactggca

SEQ ID NO: 47244 - DNA, 12 bp, synthetic construct
  misc_feature 1..12: note = synthetic [barcode part2]
  source 1..12: mol_type = other DNA
cgtgccagattg

SEQ ID NO: 47245 - DNA, 12 bp, synthetic construct
  misc_feature 1..12: note = synthetic [barcode part2]
  source 1..12: mol_type = other DNA
agtctaacacgt

SEQ ID NO: 47246 - DNA, 12 bp, synthetic construct
  misc_feature 1..12: note = synthetic [barcode part2]
  source 1..12: mol_type = other DNA
ctatgcggatta

SEQ ID NO: 47247 - DNA, 12 bp, synthetic construct
  misc_feature 1..12: note = synthetic [barcode part2]
  source 1..12: mol_type = other DNA
acgctcttacac

SEQ ID NO: 47248 - DNA, 12 bp, synthetic construct
  misc_feature 1..12: note = synthetic [barcode part2]
  source 1..12: mol_type = other DNA
cttacgcgtatc

SEQ ID NO: 47249 - DNA, 12 bp, synthetic construct
  misc_feature 1..12: note = synthetic [barcode part2]
  source 1..12: mol_type = other DNA
aacagccatact

SEQ ID NO: 47250 - DNA, 12 bp, synthetic construct
  misc_feature 1..12: note = synthetic [barcode part2]
  source 1..12: mol_type = other DNA
cggcagctacat

SEQ ID NO: 47251 - DNA, 12 bp, synthetic construct
  misc_feature 1..12: note = synthetic [barcode part2]
  source 1..12: mol_type = other DNA
atatagtggctc

SEQ ID NO: 47252 - DNA, 12 bp, synthetic construct
  misc_feature 1..12: note = synthetic [barcode part2]
  source 1..12: mol_type = other DNA
agcgcactcaac

SEQ ID NO: 47253 - DNA, 12 bp, synthetic construct
  misc_feature 1..12: note = synthetic [barcode part2]
  source 1..12: mol_type = other DNA
acggaagcatac

SEQ ID NO: 47254 - DNA, 12 bp, synthetic construct
  misc_feature 1..12: note = synthetic [barcode part2]
  source 1..12: mol_type = other DNA
acgactattagc

SEQ ID NO: 47255 - DNA, 12 bp, synthetic construct
  misc_feature 1..12: note = synthetic [barcode part2]
  source 1..12: mol_type = other DNA
agccacgttagc

SEQ ID NO: 47256 - DNA, 12 bp, synthetic construct
  misc_feature 1..12: note = synthetic [barcode part2]
  source 1..12: mol_type = other DNA
actgcgttgata

SEQ ID NO: 47257 - DNA, 12 bp, synthetic construct
  misc_feature 1..12: note = synthetic [barcode part2]
  source 1..12: mol_type = other DNA
aacgcgtccagt

SEQ ID NO: 47258 - DNA, 12 bp, synthetic construct
  misc_feature 1..12: note = synthetic [barcode part2]
  source 1..12: mol_type = other DNA
catctggcgaca

SEQ ID NO: 47259 - DNA, 12 bp, synthetic construct
  misc_feature 1..12: note = synthetic [barcode part2]
  source 1..12: mol_type = other DNA
aattggcgaagc

SEQ ID NO: 47260 - DNA, 12 bp, synthetic construct
  misc_feature 1..12: note = synthetic [barcode part2]
  source 1..12: mol_type = other DNA
aatgcgtctggc

SEQ ID NO: 47261 - DNA, 12 bp, synthetic construct
  misc_feature 1..12: note = synthetic [barcode part2]
  source 1..12: mol_type = other DNA
cgacagctgtac

SEQ ID NO: 47262 - DNA, 12 bp, synthetic construct
  misc_feature 1..12: note = synthetic [barcode part2]
  source 1..12: mol_type = other DNA
cgtgctgagttg

SEQ ID NO: 47263 - DNA, 12 bp, synthetic construct
  misc_feature 1..12: note = synthetic [barcode part2]
  source 1..12: mol_type = other DNA
atccaatgcgta

SEQ ID NO: 47264 - DNA, 12 bp, synthetic construct
  misc_feature 1..12: note = synthetic [barcode part2]
  source 1..12: mol_type = other DNA
ccgagagtgata

SEQ ID NO: 47265 - DNA, 12 bp, synthetic construct
  misc_feature 1..12: note = synthetic [barcode part2]
  source 1..12: mol_type = other DNA
ctgtaacttccg

SEQ ID NO: 47266 - DNA, 12 bp, synthetic construct
  misc_feature 1..12: note = synthetic [barcode part2]
  source 1..12: mol_type = other DNA
agtgcacttgat

SEQ ID NO: 47267 - DNA, 12 bp, synthetic construct
  misc_feature 1..12: note = synthetic [barcode part2]
  source 1..12: mol_type = other DNA
cgtaatctggcg

SEQ ID NO: 47268 - DNA, 12 bp, synthetic construct
  misc_feature 1..12: note = synthetic [barcode part2]
  source 1..12: mol_type = other DNA
agtgctggaagt

SEQ ID NO: 47269 - DNA, 12 bp, synthetic construct
  misc_feature 1..12: note = synthetic [barcode part2]
  source 1..12: mol_type = other DNA
cttcagcgttac

SEQ ID NO: 47270 - DNA, 12 bp, synthetic construct
  misc_feature 1..12: note = synthetic [barcode part2]
  source 1..12: mol_type = other DNA
cttattggctgc

SEQ ID NO: 47271 - DNA, 12 bp, synthetic construct
  misc_feature 1..12: note = synthetic [barcode part2]
  source 1..12: mol_type = other DNA
cagatcatatgc

SEQ ID NO: 47272 - DNA, 12 bp, synthetic construct
  misc_feature 1..12: note = synthetic [barcode part2]
  source 1..12: mol_type = other DNA
agcaatctatgc

SEQ ID NO: 47273 - DNA, 12 bp, synthetic construct
  misc_feature 1..12: note = synthetic [barcode part2]
  source 1..12: mol_type = other DNA
cacggcttgatg

SEQ ID NO: 47274 - DNA, 12 bp, synthetic construct
  misc_feature 1..12: note = synthetic [barcode part2]
  source 1..12: mol_type = other DNA
attcaatacgcg

SEQ ID NO: 47275 - DNA, 12 bp, synthetic construct
  misc_feature 1..12: note = synthetic [barcode part2]
  source 1..12: mol_type = other DNA
atcgtcgtatga

SEQ ID NO: 47276 - DNA, 12 bp, synthetic construct
  misc_feature 1..12: note = synthetic [barcode part2]
  source 1..12: mol_type = other DNA
ctgtcaagtgcg

SEQ ID NO: 47277 - DNA, 12 bp, synthetic construct
  misc_feature 1..12: note = synthetic [barcode part2]
  source 1..12: mol_type = other DNA
atgcacgcttct

SEQ ID NO: 47278 - DNA, 12 bp, synthetic construct
  misc_feature 1..12: note = synthetic [barcode part2]
  source 1..12: mol_type = other DNA
cgccgacaacta

SEQ ID NO: 47279 - DNA, 12 bp, synthetic construct
  misc_feature 1..12: note = synthetic [barcode part2]
  source 1..12: mol_type = other DNA
atacgcactctc

SEQ ID NO: 47280 - DNA, 12 bp, synthetic construct
  misc_feature 1..12: note = synthetic [barcode part2]
  source 1..12: mol_type = other DNA
cataatccgaca

SEQ ID NO: 47281 - DNA, 12 bp, synthetic construct
  misc_feature 1..12: note = synthetic [barcode part2]
  source 1..12: mol_type = other DNA
attcacgcaatg

SEQ ID NO: 47282 - DNA, 12 bp, synthetic construct
  misc_feature 1..12: note = synthetic [barcode part2]
  source 1..12: mol_type = other DNA
atccgacacata

SEQ ID NO: 47283 - DNA, 12 bp, synthetic construct
  misc_feature 1..12: note = synthetic [barcode part2]
  source 1..12: mol_type = other DNA
catccgatggca

SEQ ID NO: 47284 - DNA, 12 bp, synthetic construct
  misc_feature 1..12: note = synthetic [barcode part2]
  source 1..12: mol_type = other DNA
aagtgtagtgcg

SEQ ID NO: 47285 - DNA, 12 bp, synthetic construct
  misc_feature 1..12: note = synthetic [barcode part2]
  source 1..12: mol_type = other DNA
cgttgataactg

SEQ ID NO: 47286 - DNA, 12 bp, synthetic construct
  misc_feature 1..12: note = synthetic [barcode part2]
  source 1..12: mol_type = other DNA
agcgaagtgatc

SEQ ID NO: 47287 - DNA, 12 bp, synthetic construct
  misc_feature 1..12: note = synthetic [barcode part2]
  source 1..12: mol_type = other DNA
ctatcaagcaca

SEQ ID NO: 47288 - DNA, 12 bp, synthetic construct
  misc_feature 1..12: note = synthetic [barcode part2]
  source 1..12: mol_type = other DNA
atcgtgctagta

SEQ ID NO: 47289 - DNA, 12 bp, synthetic construct
  misc_feature 1..12: note = synthetic [barcode part2]
  source 1..12: mol_type = other DNA
agtgtgcaatct

SEQ ID NO: 47290 - DNA, 12 bp, synthetic construct
  misc_feature 1..12: note = synthetic [barcode part2]
  source 1..12: mol_type = other DNA
atccatacgaca

SEQ ID NO: 47291 - DNA, 12 bp, synthetic construct
  misc_feature 1..12: note = synthetic [barcode part2]
  source 1..12: mol_type = other DNA
cttcgcaatgtc

SEQ ID NO: 47292 - DNA, 12 bp, synthetic construct
  misc_feature 1..12: note = synthetic [barcode part2]
  source 1..12: mol_type = other DNA
cagcagccatac

SEQ ID NO: 47293 - DNA, 12 bp, synthetic construct
  misc_feature 1..12: note = synthetic [barcode part2]
  source 1..12: mol_type = other DNA
caatgcggctgt

SEQ ID NO: 47294 - DNA, 12 bp, synthetic construct
  misc_feature 1..12: note = synthetic [barcode part2]
  source 1..12: mol_type = other DNA
ctctggcatcat

SEQ ID NO: 47295 - DNA, 12 bp, synthetic construct
  misc_feature 1..12: note = synthetic [barcode part2]
  source 1..12: mol_type = other DNA
atgagccgctgt

SEQ ID NO: 47296 - DNA, 12 bp, synthetic construct
  misc_feature 1..12: note = synthetic [barcode part2]
  source 1..12: mol_type = other DNA
agcatgtctggc

SEQ ID NO: 47297 - DNA, 12 bp, synthetic construct
  misc_feature 1..12: note = synthetic [barcode part2]
  source 1..12: mol_type = other DNA
actgtgcattga

SEQ ID NO: 47298 - DNA, 12 bp, synthetic construct
  misc_feature 1..12: note = synthetic [barcode part2]
  source 1..12: mol_type = other DNA
acagattgccat

SEQ ID NO: 47299 - DNA, 12 bp, synthetic construct
  misc_feature 1..12: note = synthetic [barcode part2]
  source 1..12: mol_type = other DNA
atcagagccaga

SEQ ID NO: 47300 - DNA, 12 bp, synthetic construct
  misc_feature 1..12: note = synthetic [barcode part2]
  source 1..12: mol_type = other DNA
atcgttagcgta

SEQ ID NO: 47301 - DNA, 12 bp, synthetic construct
  misc_feature 1..12: note = synthetic [barcode part2]
  source 1..12: mol_type = other DNA
cggaacttctct

SEQ ID NO: 47302 - DNA, 12 bp, synthetic construct
  misc_feature 1..12: note = synthetic [barcode part2]
  source 1..12: mol_type = other DNA
caagtgcatcat

SEQ ID NO: 47303 - DNA, 12 bp, synthetic construct
  misc_feature 1..12: note = synthetic [barcode part2]
  source 1..12: mol_type = other DNA
cggcatagccat

SEQ ID NO: 47304 - DNA, 12 bp, synthetic construct
  misc_feature 1..12: note = synthetic [barcode part2]
  source 1..12: mol_type = other DNA
ccgctcttagta

SEQ ID NO: 47305 - DNA, 12 bp, synthetic construct
  misc_feature 1..12: note = synthetic [barcode part2]
  source 1..12: mol_type = other DNA
atctggccgtga

SEQ ID NO: 47306 - DNA, 12 bp, synthetic construct
  misc_feature 1..12: note = synthetic [barcode part2]
  source 1..12: mol_type = other DNA
ctcgtatcgtgt

SEQ ID NO: 47307 - DNA, 12 bp, synthetic construct
  misc_feature 1..12: note = synthetic [barcode part2]
  source 1..12: mol_type = other DNA
acttaactgcga

SEQ ID NO: 47308 - DNA, 12 bp, synthetic construct
  misc_feature 1..12: note = synthetic [barcode part2]
  source 1..12: mol_type = other DNA
ctgtatggattg

SEQ ID NO: 47309 - DNA, 12 bp, synthetic construct
  misc_feature 1..12: note = synthetic [barcode part2]
  source 1..12: mol_type = other DNA
ctaagttcacga

SEQ ID NO: 47310 - DNA, 12 bp, synthetic construct
  misc_feature 1..12: note = synthetic [barcode part2]
  source 1..12: mol_type = other DNA
ccatatgagttg

SEQ ID NO: 47311 - DNA, 12 bp, synthetic construct
  misc_feature 1..12: note = synthetic [barcode part2]
  source 1..12: mol_type = other DNA
acagctgttagt

SEQ ID NO: 47312 - DNA, 12 bp, synthetic construct
  misc_feature 1..12: note = synthetic [barcode part2]
  source 1..12: mol_type = other DNA
acttatgtggca

SEQ ID NO: 47313 - DNA, 12 bp, synthetic construct
  misc_feature 1..12: note = synthetic [barcode part2]
  source 1..12: mol_type = other DNA
ccgatcatctca

SEQ ID NO: 47314 - DNA, 12 bp, synthetic construct
  misc_feature 1..12: note = synthetic [barcode part2]
  source 1..12: mol_type = other DNA
catgattgtcga

SEQ ID NO: 47315 - DNA, 12 bp, synthetic construct
  misc_feature 1..12: note = synthetic [barcode part2]
  source 1..12: mol_type = other DNA
ctgcaatctctg

SEQ ID NO: 47316 - DNA, 12 bp, synthetic construct
  misc_feature 1..12: note = synthetic [barcode part2]
  source 1..12: mol_type = other DNA
atagagatgcgc

SEQ ID NO: 47317 - DNA, 12 bp, synthetic construct
  misc_feature 1..12: note = synthetic [barcode part2]
  source 1..12: mol_type = other DNA
caacgtgtggct

SEQ ID NO: 47318 - DNA, 12 bp, synthetic construct
  misc_feature 1..12: note = synthetic [barcode part2]
  source 1..12: mol_type = other DNA
aagacatacgcg

SEQ ID NO: 47319 - DNA, 12 bp, synthetic construct
  misc_feature 1..12: note = synthetic [barcode part2]
  source 1..12: mol_type = other DNA
ctacataagcca

SEQ ID NO: 47320 - DNA, 12 bp, synthetic construct
  misc_feature 1..12: note = synthetic [barcode part2]
  source 1..12: mol_type = other DNA
cagatgttagtc

SEQ ID NO: 47321 - DNA, 12 bp, synthetic construct
  misc_feature 1..12: note = synthetic [barcode part2]
  source 1..12: mol_type = other DNA
cgatctcttagc

SEQ ID NO: 47322 - DNA, 12 bp, synthetic construct
  misc_feature 1..12: note = synthetic [barcode part2]
  source 1..12: mol_type = other DNA
cacacatctctg

SEQ ID NO: 47323 - DNA, 12 bp, synthetic construct
  misc_feature 1..12: note = synthetic [barcode part2]
  source 1..12: mol_type = other DNA
ctccgcacatat

SEQ ID NO: 47324 - DNA, 12 bp, synthetic construct
  misc_feature 1..12: note = synthetic [barcode part2]
  source 1..12: mol_type = other DNA
agcacgcagttc

SEQ ID NO: 47325 - DNA, 12 bp, synthetic construct
  misc_feature 1..12: note = synthetic [barcode part2]
  source 1..12: mol_type = other DNA
agcatgtggctc

SEQ ID NO: 47326 - DNA, 12 bp, synthetic construct
  misc_feature 1..12: note = synthetic [barcode part2]
  source 1..12: mol_type = other DNA
cgtaactcagcg

SEQ ID NO: 47327 - DNA, 12 bp, synthetic construct
  misc_feature 1..12: note = synthetic [barcode part2]
  source 1..12: mol_type = other DNA
atcgtgccgaca

SEQ ID NO: 47328 - DNA, 12 bp, synthetic construct
  misc_feature 1..12: note = synthetic [barcode part2]
  source 1..12: mol_type = other DNA
ctcagttccgat

SEQ ID NO: 47329 - DNA, 12 bp, synthetic construct
  misc_feature 1..12: note = synthetic [barcode part2]
  source 1..12: mol_type = other DNA
atagtgcagagc

SEQ ID NO: 47330 - DNA, 12 bp, synthetic construct
  misc_feature 1..12: note = synthetic [barcode part2]
  source 1..12: mol_type = other DNA
aatgtatccagc

SEQ ID NO: 47331 - DNA, 12 bp, synthetic construct
  misc_feature 1..12: note = synthetic [barcode part2]
  source 1..12: mol_type = other DNA
ctggattatgtg

SEQ ID NO: 47332 - DNA, 12 bp, synthetic construct
  misc_feature 1..12: note = synthetic [barcode part2]
  source 1..12: mol_type = other DNA
cgtgaagatgtg

SEQ ID NO: 47333 - DNA, 12 bp, synthetic construct
  misc_feature 1..12: note = synthetic [barcode part2]
  source 1..12: mol_type = other DNA
ctcacgctacat

SEQ ID NO: 47334 - DNA, 12 bp, synthetic construct
  misc_feature 1..12: note = synthetic [barcode part2]
  source 1..12: mol_type = other DNA
atccatagctga

SEQ ID NO: 47335 - DNA, 12 bp, synthetic construct
  misc_feature 1..12: note = synthetic [barcode part2]
  source 1..12: mol_type = other DNA
agacagccaatg

SEQ ID NO: 47336 - DNA, 12 bp, synthetic construct
  misc_feature 1..12: note = synthetic [barcode part2]
  source 1..12: mol_type = other DNA
actgctgcacga

SEQ ID NO: 47337 - DNA, 12 bp, synthetic construct
  misc_feature 1..12: note = synthetic [barcode part2]
  source 1..12: mol_type = other DNA
catcagcagcca

SEQ ID NO: 47338 - DNA, 12 bp, synthetic construct
  misc_feature 1..12: note = synthetic [barcode part2]
  source 1..12: mol_type = other DNA
actctggcttca

SEQ ID NO: 47339 - DNA, 12 bp, synthetic construct
  misc_feature 1..12: note = synthetic [barcode part2]
  source 1..12: mol_type = other DNA
caagccacacgt

SEQ ID NO: 47340 - DNA, 12 bp, synthetic construct
  misc_feature 1..12: note = synthetic [barcode part2]
  source 1..12: mol_type = other DNA
ctccacgtacat

SEQ ID NO: 47341 - DNA, 12 bp, synthetic construct
  misc_feature 1..12: note = synthetic [barcode part2]
  source 1..12: mol_type = other DNA
caagcacgtcgt

SEQ ID NO: 47342 - DNA, 12 bp, synthetic construct
  misc_feature 1..12: note = synthetic [barcode part2]
  source 1..12: mol_type = other DNA
ctagcgtaacta

SEQ ID NO: 47343 - DNA, 12 bp, synthetic construct
  misc_feature 1..12: note = synthetic [barcode part2]
  source 1..12: mol_type = other DNA
atggccattagt

SEQ ID NO: 47344 - DNA, 12 bp, synthetic construct
  misc_feature 1..12: note = synthetic [barcode part2]
  source 1..12: mol_type = other DNA
cttcatatgcgc

SEQ ID NO: 47345 - DNA, 12 bp, synthetic construct
  misc_feature 1..12: note = synthetic [barcode part2]
  source 1..12: mol_type = other DNA
cattagtctgga

SEQ ID NO: 47346 - DNA, 12 bp, synthetic construct
  misc_feature 1..12: note = synthetic [barcode part2]
  source 1..12: mol_type = other DNA
cagatacgccac

SEQ ID NO: 47347 - DNA, 12 bp, synthetic construct
  misc_feature 1..12: note = synthetic [barcode part2]
  source 1..12: mol_type = other DNA
atcgctgacata

SEQ ID NO: 47348 - DNA, 12 bp, synthetic construct
  misc_feature 1..12: note = synthetic [barcode part2]
  source 1..12: mol_type = other DNA
ctcacatcgcat

SEQ ID NO: 47349 - DNA, 12 bp, synthetic construct
  misc_feature 1..12: note = synthetic [barcode part2]
  source 1..12: mol_type = other DNA
agttgcgtcaat

SEQ ID NO: 47350 - DNA, 12 bp, synthetic construct
  misc_feature 1..12: note = synthetic [barcode part2]
  source 1..12: mol_type = other DNA
cggacattaact

SEQ ID NO: 47351 - DNA, 12 bp, synthetic construct
  misc_feature 1..12: note = synthetic [barcode part2]
  source 1..12: mol_type = other DNA
ctgtgcgaatcg

SEQ ID NO: 47352 - DNA, 12 bp, synthetic construct
  misc_feature 1..12: note = synthetic [barcode part2]
  source 1..12: mol_type = other DNA
ctgtgatcttcg

SEQ ID NO: 47353 - DNA, 12 bp, synthetic construct
  misc_feature 1..12: note = synthetic [barcode part2]
  source 1..12: mol_type = other DNA
cgtggaagtatg

SEQ ID NO: 47354 - DNA, 12 bp, synthetic construct
  misc_feature 1..12: note = synthetic [barcode part2]
  source 1..12: mol_type = other DNA
cagcgactatgc

SEQ ID NO: 47355 - DNA, 12 bp, synthetic construct
  misc_feature 1..12: note = synthetic [barcode part2]
  source 1..12: mol_type = other DNA
acattagcgact

SEQ ID NO: 47356 - DNA, 12 bp, synthetic construct
  misc_feature 1..12: note = synthetic [barcode part2]
  source 1..12: mol_type = other DNA
acgattgctggc

SEQ ID NO: 47357 - DNA, 12 bp, synthetic construct
  misc_feature 1..12: note = synthetic [barcode part2]
  source 1..12: mol_type = other DNA
ccgattgcttca

SEQ ID NO: 47358 - DNA, 12 bp, synthetic construct
  misc_feature 1..12: note = synthetic [barcode part2]
  source 1..12: mol_type = other DNA
cagtctcttgac

SEQ ID NO: 47359 - DNA, 12 bp, synthetic construct
  misc_feature 1..12: note = synthetic [barcode part2]
  source 1..12: mol_type = other DNA
ctccgacgttat

SEQ ID NO: 47360 - DNA, 12 bp, synthetic construct
  misc_feature 1..12: note = synthetic [barcode part2]
  source 1..12: mol_type = other DNA
ctacttccgaca

SEQ ID NO: 47361 - DNA, 12 bp, synthetic construct
  misc_feature 1..12: note = synthetic [barcode part2]
  source 1..12: mol_type = other DNA
cggaactggaat

SEQ ID NO: 47362 - DNA, 12 bp, synthetic construct
  misc_feature 1..12: note = synthetic [barcode part2]
  source 1..12: mol_type = other DNA
acggaagacatc

SEQ ID NO: 47363 - DNA, 12 bp, synthetic construct
  misc_feature 1..12: note = synthetic [barcode part2]
  source 1..12: mol_type = other DNA
cactagtgattg

SEQ ID NO: 47364 - DNA, 12 bp, synthetic construct
  misc_feature 1..12: note = synthetic [barcode part2]
  source 1..12: mol_type = other DNA
cgagctgtacac

SEQ ID NO: 47365 - DNA, 12 bp, synthetic construct
  misc_feature 1..12: note = synthetic [barcode part2]
  source 1..12: mol_type = other DNA
cagcgacatgtc

SEQ ID NO: 47366 - DNA, 12 bp, synthetic construct
  misc_feature 1..12: note = synthetic [barcode part2]
  source 1..12: mol_type = other DNA
cggatacactat

SEQ ID NO: 47367 - DNA, 12 bp, synthetic construct
  misc_feature 1..12: note = synthetic [barcode part2]
  source 1..12: mol_type = other DNA
agcgtatccgac

SEQ ID NO: 47368 - DNA, 12 bp, synthetic construct
  misc_feature 1..12: note = synthetic [barcode part2]
  source 1..12: mol_type = other DNA
agaacgcgtatg

SEQ ID NO: 47369 - DNA, 12 bp, synthetic construct
  misc_feature 1..12: note = synthetic [barcode part2]
  source 1..12: mol_type = other DNA
ctatcggcgtga

SEQ ID NO: 47370 - DNA, 12 bp, synthetic construct
  misc_feature 1..12: note = synthetic [barcode part2]
  source 1..12: mol_type = other DNA
cacatcagattg

SEQ ID NO: 47371 - DNA, 12 bp, synthetic construct
  misc_feature 1..12: note = synthetic [barcode part2]
  source 1..12: mol_type = other DNA
cagacatactac

SEQ ID NO: 47372 - DNA, 12 bp, synthetic construct
  misc_feature 1..12: note = synthetic [barcode part2]
  source 1..12: mol_type = other DNA
cgtcttcacatg

SEQ ID NO: 47373 - DNA, 12 bp, synthetic construct
  misc_feature 1..12: note = synthetic [barcode part2]
  source 1..12: mol_type = other DNA
actgcgtgtcga

SEQ ID NO: 47374 - DNA, 12 bp, synthetic construct
  misc_feature 1..12: note = synthetic [barcode part2]
  source 1..12: mol_type = other DNA
cagtaactacac

SEQ ID NO: 47375 - DNA, 12 bp, synthetic construct
  misc_feature 1..12: note = synthetic [barcode part2]
  source 1..12: mol_type = other DNA
ccatctctgatg

SEQ ID NO: 47376 - DNA, 12 bp, synthetic construct
  misc_feature 1..12: note = synthetic [barcode part2]
  source 1..12: mol_type = other DNA
ctccaatcgact

SEQ ID NO: 47377 - DNA, 12 bp, synthetic construct
  misc_feature 1..12: note = synthetic [barcode part2]
  source 1..12: mol_type = other DNA
cagacattgatc

SEQ ID NO: 47378 - DNA, 12 bp, synthetic construct
  misc_feature 1..12: note = synthetic [barcode part2]
  source 1..12: mol_type = other DNA
ctcgcgttgtat

SEQ ID NO: 47379 - DNA, 12 bp, synthetic construct
  misc_feature 1..12: note = synthetic [barcode part2]
  source 1..12: mol_type = other DNA
atgccgagccat

SEQ ID NO: 47380 - DNA, 12 bp, synthetic construct
  misc_feature 1..12: note = synthetic [barcode part2]
  source 1..12: mol_type = other DNA
atcggcttctca

SEQ ID NO: 47381 - DNA, 12 bp, synthetic construct
  misc_feature 1..12: note = synthetic [barcode part2]
  source 1..12: mol_type = other DNA
ccgaactatgta

SEQ ID NO: 47382 - DNA, 12 bp, synthetic construct
  misc_feature 1..12: note = synthetic [barcode part2]
  source 1..12: mol_type = other DNA
ccgatacaatca

SEQ ID NO: 47383 - DNA, 12 bp, synthetic construct
  misc_feature 1..12: note = synthetic [barcode part2]
  source 1..12: mol_type = other DNA
atcgctgtgcga

SEQ ID NO: 47384 - DNA, 12 bp, synthetic construct
  misc_feature 1..12: note = synthetic [barcode part2]
  source 1..12: mol_type = other DNA
catcttcgcgta

SEQ ID NO: 47385 - DNA, 12 bp, synthetic construct
  misc_feature 1..12: note = synthetic [barcode part2]
  source 1..12: mol_type = other DNA
ctggcacgattg

SEQ ID NO: 47386 - DNA, 12 bp, synthetic construct
  misc_feature 1..12: note = synthetic [barcode part2]
  source 1..12: mol_type = other DNA
actctcttcgga

SEQ ID NO: 47387 - DNA, 12 bp, synthetic construct
  misc_feature 1..12: note = synthetic [barcode part2]
  source 1..12: mol_type = other DNA
ctacagcgaaga

SEQ ID NO: 47388 - DNA, 12 bp, synthetic construct
  misc_feature 1..12: note = synthetic [barcode part2]
  source 1..12: mol_type = other DNA
cttcgtgtacac

SEQ ID NO: 47389 - DNA, 12 bp, synthetic construct
  misc_feature 1..12: note = synthetic [barcode part2]
  source 1..12: mol_type = other DNA
ccgagccgtata

SEQ ID NO: 47390 - DNA, 12 bp, synthetic construct
  misc_feature 1..12: note = synthetic [barcode part2]
  source 1..12: mol_type = other DNA
ctcggctaatct

SEQ ID NO: 47391 - DNA, 12 bp, synthetic construct
  misc_feature 1..12: note = synthetic [barcode part2]
  source 1..12: mol_type = other DNA
ctcgtcgattgt

SEQ ID NO: 47392 - DNA, 12 bp, synthetic construct
  misc_feature 1..12: note = synthetic [barcode part2]
  source 1..12: mol_type = other DNA
atccgactgcga

SEQ ID NO: 47393 - DNA, 12 bp, synthetic construct
  misc_feature 1..12: note = synthetic [barcode part2]
  source 1..12: mol_type = other DNA
acacttcgtgct

SEQ ID NO: 47394 - DNA, 12 bp, synthetic construct
  misc_feature 1..12: note = synthetic [barcode part2]
  source 1..12: mol_type = other DNA
atcattgcacga

SEQ ID NO: 47395 - DNA, 12 bp, synthetic construct
  misc_feature 1..12: note = synthetic [barcode part2]
  source 1..12: mol_type = other DNA
cgcgattcaata

SEQ ID NO: 47396 - DNA, 12 bp, synthetic construct
  misc_feature 1..12: note = synthetic [barcode part2]
  source 1..12: mol_type = other DNA
ctgaatcgtgcg

SEQ ID NO: 47397 - DNA, 12 bp, synthetic construct
  misc_feature 1..12: note = synthetic [barcode part2]
  source 1..12: mol_type = other DNA
ctgactacttcg

SEQ ID NO: 47398 - DNA, 12 bp, synthetic construct
  misc_feature 1..12: note = synthetic [barcode part2]
  source 1..12: mol_type = other DNA
actattgtgcga

SEQ ID NO: 47399 - DNA, 12 bp, synthetic construct
  misc_feature 1..12: note = synthetic [barcode part2]
  source 1..12: mol_type = other DNA
catagccgtcga

SEQ ID NO: 47400 - DNA, 12 bp, synthetic construct
  misc_feature 1..12: note = synthetic [barcode part2]
  source 1..12: mol_type = other DNA
cggcacgatcat

SEQ ID NO: 47401 - DNA, 12 bp, synthetic construct
  misc_feature 1..12: note = synthetic [barcode part2]
  source 1..12: mol_type = other DNA
atcgttacgtga

SEQ ID NO: 47402 - DNA, 12 bp, synthetic construct
  misc_feature 1..12: note = synthetic [barcode part2]
  source 1..12: mol_type = other DNA
aatacgcgattc

SEQ ID NO: 47403 - DNA, 12 bp, synthetic construct
  misc_feature 1..12: note = synthetic [barcode part2]
  source 1..12: mol_type = other DNA
agtccgacgtgt

SEQ ID NO: 47404 - DNA, 12 bp, synthetic construct
  misc_feature 1..12: note = synthetic [barcode part2]
  source 1..12: mol_type = other DNA
cggatacgtcgt

SEQ ID NO: 47405 - DNA, 12 bp, synthetic construct
  misc_feature 1..12: note = synthetic [barcode part2]
  source 1..12: mol_type = other DNA
actccgattcca

SEQ ID NO: 47406 - DNA, 12 bp, synthetic construct
  misc_feature 1..12: note = synthetic [barcode part2]
  source 1..12: mol_type = other DNA
ctcgtgctatgt

SEQ ID NO: 47407 - DNA, 12 bp, synthetic construct
  misc_feature 1..12: note = synthetic [barcode part2]
  source 1..12: mol_type = other DNA
cgaacatcaatc

SEQ ID NO: 47408 - DNA, 12 bp, synthetic construct
  misc_feature 1..12: note = synthetic [barcode part2]
  source 1..12: mol_type = other DNA
cgagcgttagtc

SEQ ID NO: 47409 - DNA, 12 bp, synthetic construct
  misc_feature 1..12: note = synthetic [barcode part2]
  source 1..12: mol_type = other DNA
ccgccgaacata

SEQ ID NO: 47410 - DNA, 12 bp, synthetic construct
  misc_feature 1..12: note = synthetic [barcode part2]
  source 1..12: mol_type = other DNA
caacgacgtgct

SEQ ID NO: 47411 - DNA, 12 bp, synthetic construct
  misc_feature 1..12: note = synthetic [barcode part2]
  source 1..12: mol_type = other DNA
atccaatcgtga

SEQ ID NO: 47412 - DNA, 12 bp, synthetic construct
  misc_feature 1..12: note = synthetic [barcode part2]
  source 1..12: mol_type = other DNA
aacgattcgtgt

SEQ ID NO: 47413 - DNA, 12 bp, synthetic construct
  misc_feature 1..12: note = synthetic [barcode part2]
  source 1..12: mol_type = other DNA
cacttgacgacg

SEQ ID NO: 47414 - DNA, 12 bp, synthetic construct
  misc_feature 1..12: note = synthetic [barcode part2]
  source 1..12: mol_type = other DNA
ctctcggctaat

SEQ ID NO: 47415 - DNA, 12 bp, synthetic construct
  misc_feature 1..12: note = synthetic [barcode part2]
  source 1..12: mol_type = other DNA
attcgcacgacg

SEQ ID NO: 47416 - DNA, 12 bp, synthetic construct
  misc_feature 1..12: note = synthetic [barcode part2]
  source 1..12: mol_type = other DNA
ccatgattctcg

SEQ ID NO: 47417 - DNA, 12 bp, synthetic construct
  misc_feature 1..12: note = synthetic [barcode part2]
  source 1..12: mol_type = other DNA
ctcgattccagt

SEQ ID NO: 47418 - DNA, 12 bp, synthetic construct
  misc_feature 1..12: note = synthetic [barcode part2]
  source 1..12: mol_type = other DNA
caagtcgtatgt

SEQ ID NO: 47419 - DNA, 12 bp, synthetic construct
  misc_feature 1..12: note = synthetic [barcode part2]
  source 1..12: mol_type = other DNA
agcgaagactac

SEQ ID NO: 47420 - DNA, 12 bp, synthetic construct
  misc_feature 1..12: note = synthetic [barcode part2]
  source 1..12: mol_type = other DNA
ctagcgttcgga

SEQ ID NO: 47421 - DNA, 12 bp, synthetic construct
  misc_feature 1..12: note = synthetic [barcode part2]
  source 1..12: mol_type = other DNA
cgatgatgtatc

SEQ ID NO: 47422 - DNA, 12 bp, synthetic construct
  misc_feature 1..12: note = synthetic [barcode part2]
  source 1..12: mol_type = other DNA
cgaactagtatc

SEQ ID NO: 47423 - DNA, 12 bp, synthetic construct
  misc_feature 1..12: note = synthetic [barcode part2]
  source 1..12: mol_type = other DNA
cattaactcgga

SEQ ID NO: 47424 - DNA, 12 bp, synthetic construct
  misc_feature 1..12: note = synthetic [barcode part2]
  source 1..12: mol_type = other DNA
agctacatcggc

SEQ ID NO: 47425 - DNA, 12 bp, synthetic construct
  misc_feature 1..12: note = synthetic [barcode part2]
  source 1..12: mol_type = other DNA
atcgcacgtcga

SEQ ID NO: 47426 - DNA, 12 bp, synthetic construct
  misc_feature 1..12: note = synthetic [barcode part2]
  source 1..12: mol_type = other DNA
ccagttacttcg

SEQ ID NO: 47427 - DNA, 12 bp, synthetic construct
  misc_feature 1..12: note = synthetic [barcode part2]
  source 1..12: mol_type = other DNA
actcgcacaata

SEQ ID NO: 47428 - DNA, 12 bp, synthetic construct
  misc_feature 1..12: note = synthetic [barcode part2]
  source 1..12: mol_type = other DNA
aagcacgacatg

SEQ ID NO: 47429 - DNA, 12 bp, synthetic construct
  misc_feature 1..12: note = synthetic [barcode part2]
  source 1..12: mol_type = other DNA
cgaattgatgtc

SEQ ID NO: 47430 - DNA, 12 bp, synthetic construct
  misc_feature 1..12: note = synthetic [barcode part2]
  source 1..12: mol_type = other DNA
aacgtcgtctct

SEQ ID NO: 47431 - DNA, 12 bp, synthetic construct
  misc_feature 1..12: note = synthetic [barcode part2]
  source 1..12: mol_type = other DNA
aattgcgccgac

SEQ ID NO: 47432 - DNA, 12 bp, synthetic construct
  misc_feature 1..12: note = synthetic [barcode part2]
  source 1..12: mol_type = other DNA
acgacatgaagc

SEQ ID NO: 47433 - DNA, 12 bp, synthetic construct
  misc_feature 1..12: note = synthetic [barcode part2]
  source 1..12: mol_type = other DNA
agtgcgtccgat

SEQ ID NO: 47434 - DNA, 12 bp, synthetic construct
  misc_feature 1..12: note = synthetic [barcode part2]
  source 1..12: mol_type = other DNA
cgtcgacagttg

SEQ ID NO: 47435 - DNA, 12 bp, synthetic construct
  misc_feature 1..12: note = synthetic [barcode part2]
  source 1..12: mol_type = other DNA
aatccgacatac

SEQ ID NO: 47436 - DNA, 12 bp, synthetic construct
  misc_feature 1..12: note = synthetic [barcode part2]
  source 1..12: mol_type = other DNA
cgatacatagtc

SEQ ID NO: 47437 - DNA, 12 bp, synthetic construct
  misc_feature 1..12: note = synthetic [barcode part2]
  source 1..12: mol_type = other DNA
catcgtgcttca

SEQ ID NO: 47438 - DNA, 12 bp, synthetic construct
  misc_feature 1..12: note = synthetic [barcode part2]
  source 1..12: mol_type = other DNA
cgatacagctgc

SEQ ID NO: 47439 - DNA, 12 bp, synthetic construct
  misc_feature 1..12: note = synthetic [barcode part2]
  source 1..12: mol_type = other DNA
aagcgactagtg

SEQ ID NO: 47440 - DNA, 12 bp, synthetic construct
  misc_feature 1..12: note = synthetic [barcode part2]
  source 1..12: mol_type = other DNA
ccgtgcgagtta

SEQ ID NO: 47441 - DNA, 12 bp, synthetic construct
  misc_feature 1..12: note = synthetic [barcode part2]
  source 1..12: mol_type = other DNA
aatcgcatcggc

SEQ ID NO: 47442 - DNA, 12 bp, synthetic construct
  misc_feature 1..12: note = synthetic [barcode part2]
  source 1..12: mol_type = other DNA
actcttcggcta

SEQ ID NO: 47443 - DNA, 12 bp, synthetic construct
  misc_feature 1..12: note = synthetic [barcode part2]
  source 1..12: mol_type = other DNA
ccgatgttcgga

SEQ ID NO: 47444 - DNA, 12 bp, synthetic construct
  misc_feature 1..12: note = synthetic [barcode part2]
  source 1..12: mol_type = other DNA
atccacgattga

SEQ ID NO: 47445 - DNA, 12 bp, synthetic construct
  misc_feature 1..12: note = synthetic [barcode part2]
  source 1..12: mol_type = other DNA
atataactcggc

SEQ ID NO: 47446 - DNA, 12 bp, synthetic construct
  misc_feature 1..12: note = synthetic [barcode part2]
  source 1..12: mol_type = other DNA
aatgtcgagagc

SEQ ID NO: 47447 - DNA, 12 bp, synthetic construct
  misc_feature 1..12: note = synthetic [barcode part2]
  source 1..12: mol_type = other DNA
actgccatgcga

SEQ ID NO: 47448 - DNA, 12 bp, synthetic construct
  misc_feature 1..12: note = synthetic [barcode part2]
  source 1..12: mol_type = other DNA
agcgagacaatc

SEQ ID NO: 47449 - DNA, 12 bp, synthetic construct
  misc_feature 1..12: note = synthetic [barcode part2]
  source 1..12: mol_type = other DNA
ctaatactcgga

SEQ ID NO: 47450 - DNA, 12 bp, synthetic construct
  misc_feature 1..12: note = synthetic [barcode part2]
  source 1..12: mol_type = other DNA
attcgcatagtg

SEQ ID NO: 47451 - DNA, 12 bp, synthetic construct
  misc_feature 1..12: note = synthetic [barcode part2]
  source 1..12: mol_type = other DNA
atagccatcggc

SEQ ID NO: 47452 - DNA, 12 bp, synthetic construct
  misc_feature 1..12: note = synthetic [barcode part2]
  source 1..12: mol_type = other DNA
cacgaagatacg

SEQ ID NO: 47453 - DNA, 12 bp, synthetic construct
  misc_feature 1..12: note = synthetic [barcode part2]
  source 1..12: mol_type = other DNA
ctcgttacgact

SEQ ID NO: 47454 - DNA, 12 bp, synthetic construct
  misc_feature 1..12: note = synthetic [barcode part2]
  source 1..12: mol_type = other DNA
agttcggacgct

SEQ ID NO: 47455 - DNA, 12 bp, synthetic construct
  misc_feature 1..12: note = synthetic [barcode part2]
  source 1..12: mol_type = other DNA
cgacagcgtatc

SEQ ID NO: 47456 - DNA, 12 bp, synthetic construct
  misc_feature 1..12: note = synthetic [barcode part2]
  source 1..12: mol_type = other DNA
cgacttcttgac

SEQ ID NO: 47457 - DNA, 12 bp, synthetic construct
  misc_feature 1..12: note = synthetic [barcode part2]
  source 1..12: mol_type = other DNA
acttgcgattga

SEQ ID NO: 47458 - DNA, 12 bp, synthetic construct
  misc_feature 1..12: note = synthetic [barcode part2]
  source 1..12: mol_type = other DNA
catacgcgaaga

SEQ ID NO: 47459 - DNA, 12 bp, synthetic construct
  misc_feature 1..12: note = synthetic [barcode part2]
  source 1..12: mol_type = other DNA
atgtctcgtgct

SEQ ID NO: 47460 - DNA, 12 bp, synthetic construct
  misc_feature 1..12: note = synthetic [barcode part2]
  source 1..12: mol_type = other DNA
cgagcgtatcac

SEQ ID NO: 47461 - DNA, 12 bp, synthetic construct
  misc_feature 1..12: note = synthetic [barcode part2]
  source 1..12: mol_type = other DNA
cattcggattga

SEQ ID NO: 47462 - DNA, 12 bp, synthetic construct
  misc_feature 1..12: note = synthetic [barcode part2]
  source 1..12: mol_type = other DNA
acgactaagttc

SEQ ID NO: 47463 - DNA, 12 bp, synthetic construct
  misc_feature 1..12: note = synthetic [barcode part2]
  source 1..12: mol_type = other DNA
atcatcatgcga

SEQ ID NO: 47464 - DNA, 12 bp, synthetic construct
  misc_feature 1..12: note = synthetic [barcode part2]
  source 1..12: mol_type = other DNA
atattgagtcgc

SEQ ID NO: 47465 - DNA, 12 bp, synthetic construct
  misc_feature 1..12: note = synthetic [barcode part2]
  source 1..12: mol_type = other DNA
actcgacacgca

SEQ ID NO: 47466 - DNA, 12 bp, synthetic construct
  misc_feature 1..12: note = synthetic [barcode part2]
  source 1..12: mol_type = other DNA
cgttggcaatcg

SEQ ID NO: 47467 - DNA, 12 bp, synthetic construct
  misc_feature 1..12: note = synthetic [barcode part2]
  source 1..12: mol_type = other DNA
caacacgattgt

SEQ ID NO: 47468 - DNA, 12 bp, synthetic construct
  misc_feature 1..12: note = synthetic [barcode part2]
  source 1..12: mol_type = other DNA
agccacgagttc

SEQ ID NO: 47469 - DNA, 12 bp, synthetic construct
  misc_feature 1..12: note = synthetic [barcode part2]
  source 1..12: mol_type = other DNA
acgattgtcaac

SEQ ID NO: 47470 - DNA, 12 bp, synthetic construct
  misc_feature 1..12: note = synthetic [barcode part2]
  source 1..12: mol_type = other DNA
cgaagagctaac

SEQ ID NO: 47471 - DNA, 12 bp, synthetic construct
  misc_feature 1..12: note = synthetic [barcode part2]
  source 1..12: mol_type = other DNA
cattctcgcaca

SEQ ID NO: 47472 - DNA, 12 bp, synthetic construct
  misc_feature 1..12: note = synthetic [barcode part2]
  source 1..12: mol_type = other DNA
cgaatacatcac

SEQ ID NO: 47473 - DNA, 12 bp, synthetic construct
  misc_feature 1..12: note = synthetic [barcode part2]
  source 1..12: mol_type = other DNA
catgaagcacga

SEQ ID NO: 47474 - DNA, 12 bp, synthetic construct
  misc_feature 1..12: note = synthetic [barcode part2]
  source 1..12: mol_type = other DNA
atcgcgttggca

SEQ ID NO: 47475 - DNA, 12 bp, synthetic construct
  misc_feature 1..12: note = synthetic [barcode part2]
  source 1..12: mol_type = other DNA
aagatcacgacg

SEQ ID NO: 47476 - DNA, 12 bp, synthetic construct
  misc_feature 1..12: note = synthetic [barcode part2]
  source 1..12: mol_type = other DNA
ctattgatgcga

SEQ ID NO: 47477 - DNA, 12 bp, synthetic construct
  misc_feature 1..12: note = synthetic [barcode part2]
  source 1..12: mol_type = other DNA
cgcgtcgagtta

SEQ ID NO: 47478 - DNA, 12 bp, synthetic construct
  misc_feature 1..12: note = synthetic [barcode part2]
  source 1..12: mol_type = other DNA
cgagaagtcaac

SEQ ID NO: 47479 - DNA, 12 bp, synthetic construct
  misc_feature 1..12: note = synthetic [barcode part2]
  source 1..12: mol_type = other DNA
actggaatcgga

SEQ ID NO: 47480 - DNA, 12 bp, synthetic construct
  misc_feature 1..12: note = synthetic [barcode part2]
  source 1..12: mol_type = other DNA
attcgacatgtg

SEQ ID NO: 47481 - DNA, 12 bp, synthetic construct
  misc_feature 1..12: note = synthetic [barcode part2]
  source 1..12: mol_type = other DNA
cgttaacgattg

SEQ ID NO: 47482 - DNA, 12 bp, synthetic construct
  misc_feature 1..12: note = synthetic [barcode part2]
  source 1..12: mol_type = other DNA
acgagttgtcgc

SEQ ID NO: 47483 - DNA, 12 bp, synthetic construct
  misc_feature 1..12: note = synthetic [barcode part2]
  source 1..12: mol_type = other DNA
cgcaactcgaca

SEQ ID NO: 47484 - DNA, 12 bp, synthetic construct
  misc_feature 1..12: note = synthetic [barcode part2]
  source 1..12: mol_type = other DNA
cgatagtgcgtc

SEQ ID NO: 47485 - DNA, 12 bp, synthetic construct
  misc_feature 1..12: note = synthetic [barcode part2]
  source 1..12: mol_type = other DNA
aattcggatgtc

SEQ ID NO: 47486 - DNA, 12 bp, synthetic construct
  misc_feature 1..12: note = synthetic [barcode part2]
  source 1..12: mol_type = other DNA
acaagttcgact

SEQ ID NO: 47487 - DNA, 12 bp, synthetic construct
  misc_feature 1..12: note = synthetic [barcode part2]
  source 1..12: mol_type = other DNA
ctattagcacga

SEQ ID NO: 47488 - DNA, 12 bp, synthetic construct
  misc_feature 1..12: note = synthetic [barcode part2]
  source 1..12: mol_type = other DNA
ccgaactgcaca

SEQ ID NO: 47489 - DNA, 12 bp, synthetic construct
  misc_feature 1..12: note = synthetic [barcode part2]
  source 1..12: mol_type = other DNA
acgaatcattgc

SEQ ID NO: 47490 - DNA, 12 bp, synthetic construct
  misc_feature 1..12: note = synthetic [barcode part2]
  source 1..12: mol_type = other DNA
aacagttcgcat

SEQ ID NO: 47491 - DNA, 12 bp, synthetic construct
  misc_feature 1..12: note = synthetic [barcode part2]
  source 1..12: mol_type = other DNA
catcgacggcta

SEQ ID NO: 47492 - DNA, 12 bp, synthetic construct
  misc_feature 1..12: note = synthetic [barcode part2]
  source 1..12: mol_type = other DNA
atcgagaagcca

SEQ ID NO: 47493 - DNA, 12 bp, synthetic construct
  misc_feature 1..12: note = synthetic [barcode part2]
  source 1..12: mol_type = other DNA
cttccgactaac

SEQ ID NO: 47494 - DNA, 12 bp, synthetic construct
  misc_feature 1..12: note = synthetic [barcode part2]
  source 1..12: mol_type = other DNA
atgaatcgtcgt

SEQ ID NO: 47495 - DNA, 12 bp, synthetic construct
  misc_feature 1..12: note = synthetic [barcode part2]
  source 1..12: mol_type = other DNA
ccgatacggcta

SEQ ID NO: 47496 - DNA, 12 bp, synthetic construct
  misc_feature 1..12: note = synthetic [barcode part2]
  source 1..12: mol_type = other DNA
aatcgcactaac

SEQ ID NO: 47497 - DNA, 12 bp, synthetic construct
  misc_feature 1..12: note = synthetic [barcode part2]
  source 1..12: mol_type = other DNA
acttacagtcga

SEQ ID NO: 47498 - DNA, 12 bp, synthetic construct
  misc_feature 1..12: note = synthetic [barcode part2]
  source 1..12: mol_type = other DNA
catgagatgcga

SEQ ID NO: 47499 - DNA, 12 bp, synthetic construct
  misc_feature 1..12: note = synthetic [barcode part2]
  source 1..12: mol_type = other DNA
agttgcgaatct

SEQ ID NO: 47500 - DNA, 12 bp, synthetic construct
  misc_feature 1..12: note = synthetic [barcode part2]
  source 1..12: mol_type = other DNA
atgattgccgat

SEQ ID NO: 47501 - DNA, 12 bp, synthetic construct
  misc_feature 1..12: note = synthetic [barcode part2]
  source 1..12: mol_type = other DNA
ctagtcggaaga

SEQ ID NO: 47502 - DNA, 12 bp, synthetic construct
  misc_feature 1..12: note = synthetic [barcode part2]
  source 1..12: mol_type = other DNA
cataatcgctga

SEQ ID NO: 47503 - DNA, 12 bp, synthetic construct
  misc_feature 1..12: note = synthetic [barcode part2]
  source 1..12: mol_type = other DNA
atactctcgcac

SEQ ID NO: 47504 - DNA, 12 bp, synthetic construct
  misc_feature 1..12: note = synthetic [barcode part2]
  source 1..12: mol_type = other DNA
cgagtcgtgtac

SEQ ID NO: 47505 - DNA, 12 bp, synthetic construct
  misc_feature 1..12: note = synthetic [barcode part2]
  source 1..12: mol_type = other DNA
agatgcgacatg

SEQ ID NO: 47506 - DNA, 12 bp, synthetic construct
  misc_feature 1..12: note = synthetic [barcode part2]
  source 1..12: mol_type = other DNA
caacgactgcgt

SEQ ID NO: 47507 - DNA, 12 bp, synthetic construct
  misc_feature 1..12: note = synthetic [barcode part2]
  source 1..12: mol_type = other DNA
agcgattcatac

SEQ ID NO: 47508 - DNA, 12 bp, synthetic construct
  misc_feature 1..12: note = synthetic [barcode part2]
  source 1..12: mol_type = other DNA
cattcaacgaca

SEQ ID NO: 47509 - DNA, 12 bp, synthetic construct
  misc_feature 1..12: note = synthetic [barcode part2]
  source 1..12: mol_type = other DNA
atcgcactgata

SEQ ID NO: 47510 - DNA, 12 bp, synthetic construct
  misc_feature 1..12: note = synthetic [barcode part2]
  source 1..12: mol_type = other DNA
atcgtcgatgta

SEQ ID NO: 47511 - DNA, 12 bp, synthetic construct
  misc_feature 1..12: note = synthetic [barcode part2]
  source 1..12: mol_type = other DNA
ctatgcgagcca

SEQ ID NO: 47512 - DNA, 12 bp, synthetic construct
  misc_feature 1..12: note = synthetic [barcode part2]
  source 1..12: mol_type = other DNA
agtgtcgcttct

SEQ ID NO: 47513 - DNA, 12 bp, synthetic construct
  misc_feature 1..12: note = synthetic [barcode part2]
  source 1..12: mol_type = other DNA
ataattgtcggc

SEQ ID NO: 47514 - DNA, 12 bp, synthetic construct
  misc_feature 1..12: note = synthetic [barcode part2]
  source 1..12: mol_type = other DNA
catcagcgatta

SEQ ID NO: 47515 - DNA, 12 bp, synthetic construct
  misc_feature 1..12: note = synthetic [barcode part2]
  source 1..12: mol_type = other DNA
acgtgatccgac

SEQ ID NO: 47516 - DNA, 12 bp, synthetic construct
  misc_feature 1..12: note = synthetic [barcode part2]
  source 1..12: mol_type = other DNA
atctctcggcta

SEQ ID NO: 47517 - DNA, 12 bp, synthetic construct
  misc_feature 1..12: note = synthetic [barcode part2]
  source 1..12: mol_type = other DNA
cgatagtcgtgc

SEQ ID NO: 47518 - DNA, 12 bp, synthetic construct
  misc_feature 1..12: note = synthetic [barcode part2]
  source 1..12: mol_type = other DNA
cgaatcatacac

SEQ ID NO: 47519 - DNA, 12 bp, synthetic construct
  misc_feature 1..12: note = synthetic [barcode part2]
  source 1..12: mol_type = other DNA
ataacgcgaagc

SEQ ID NO: 47520 - DNA, 12 bp, synthetic construct
  misc_feature 1..12: note = synthetic [barcode part2]
  source 1..12: mol_type = other DNA
aatcacgttgac

SEQ ID NO: 47521 - DNA, 12 bp, synthetic construct
  misc_feature 1..12: note = synthetic [barcode part2]
  source 1..12: mol_type = other DNA
cgtaatccaatg

SEQ ID NO: 47522 - DNA, 12 bp, synthetic construct
  misc_feature 1..12: note = synthetic [barcode part2]
  source 1..12: mol_type = other DNA
ccgttgacacga

SEQ ID NO: 47523 - DNA, 12 bp, synthetic construct
  misc_feature 1..12: note = synthetic [barcode part2]
  source 1..12: mol_type = other DNA
ccaagagtagtg

SEQ ID NO: 47524 - DNA, 12 bp, synthetic construct
  misc_feature 1..12: note = synthetic [barcode part2]
  source 1..12: mol_type = other DNA
cgtgtcgaactg

SEQ ID NO: 47525 - DNA, 12 bp, synthetic construct
  misc_feature 1..12: note = synthetic [barcode part2]
  source 1..12: mol_type = other DNA
agtgaagcgact

SEQ ID NO: 47526 - DNA, 12 bp, synthetic construct
  misc_feature 1..12: note = synthetic [barcode part2]
  source 1..12: mol_type = other DNA
acgtagtctaac

SEQ ID NO: 47527 - DNA, 12 bp, synthetic construct
  misc_feature 1..12: note = synthetic [barcode part2]
  source 1..12: mol_type = other DNA
cacgccaagttg

SEQ ID NO: 47528 - DNA, 12 bp, synthetic construct
  misc_feature 1..12: note = synthetic [barcode part2]
  source 1..12: mol_type = other DNA
acgaactgctgc

SEQ ID NO: 47529 - DNA, 12 bp, synthetic construct
  misc_feature 1..12: note = synthetic [barcode part2]
  source 1..12: mol_type = other DNA
aatgcgttcaac

SEQ ID NO: 47530 - DNA, 12 bp, synthetic construct
  misc_feature 1..12: note = synthetic [barcode part2]
  source 1..12: mol_type = other DNA
aatacatccgac

SEQ ID NO: 47531 - DNA, 12 bp, synthetic construct
  misc_feature 1..12: note = synthetic [barcode part2]
  source 1..12: mol_type = other DNA
ccattagatgtg

SEQ ID NO: 47532 - DNA, 12 bp, synthetic construct
  misc_feature 1..12: note = synthetic [barcode part2]
  source 1..12: mol_type = other DNA
attcacgtggcg

SEQ ID NO: 47533 - DNA, 12 bp, synthetic construct
  misc_feature 1..12: note = synthetic [barcode part2]
  source 1..12: mol_type = other DNA
acacgcagaagt

SEQ ID NO: 47534 - DNA, 12 bp, synthetic construct
  misc_feature 1..12: note = synthetic [barcode part2]
  source 1..12: mol_type = other DNA
cgaatcacgtgc

SEQ ID NO: 47535 - DNA, 12 bp, synthetic construct
  misc_feature 1..12: note = synthetic [barcode part2]
  source 1..12: mol_type = other DNA
acacttctgcgt

SEQ ID NO: 47536 - DNA, 12 bp, synthetic construct
  misc_feature 1..12: note = synthetic [barcode part2]
  source 1..12: mol_type = other DNA
cttcgcatatgc

SEQ ID NO: 47537 - DNA, 12 bp, synthetic construct
  misc_feature 1..12: note = synthetic [barcode part2]
  source 1..12: mol_type = other DNA
cgacacgactac

SEQ ID NO: 47538 - DNA, 12 bp, synthetic construct
  misc_feature 1..12: note = synthetic [barcode part2]
  source 1..12: mol_type = other DNA
cagactacatac

SEQ ID NO: 47539 - DNA, 12 bp, synthetic construct
  misc_feature 1..12: note = synthetic [barcode part2]
  source 1..12: mol_type = other DNA
ataagccgtcgc

SEQ ID NO: 47540 - DNA, 12 bp, synthetic construct
  misc_feature 1..12: note = synthetic [barcode part2]
  source 1..12: mol_type = other DNA
cgcatcatcgga

SEQ ID NO: 47541 - DNA, 12 bp, synthetic construct
  misc_feature 1..12: note = synthetic [barcode part2]
  source 1..12: mol_type = other DNA
cttatgtcgcac

SEQ ID NO: 47542 - DNA, 12 bp, synthetic construct
  misc_feature 1..12: note = synthetic [barcode part2]
  source 1..12: mol_type = other DNA
ccgacatagtta

SEQ ID NO: 47543 - DNA, 12 bp, synthetic construct
  misc_feature 1..12: note = synthetic [barcode part2]
  source 1..12: mol_type = other DNA
ccgaacttatga

SEQ ID NO: 47544 - DNA, 12 bp, synthetic construct
  misc_feature 1..12: note = synthetic [barcode part2]
  source 1..12: mol_type = other DNA
aattctcgctgc

SEQ ID NO: 47545 - DNA, 12 bp, synthetic construct
  misc_feature 1..12: note = synthetic [barcode part2]
  source 1..12: mol_type = other DNA
agtcttcgtcgt

SEQ ID NO: 47546 - DNA, 12 bp, synthetic construct
  misc_feature 1..12: note = synthetic [barcode part2]
  source 1..12: mol_type = other DNA
atacgacggctc

SEQ ID NO: 47547 - DNA, 12 bp, synthetic construct
  misc_feature 1..12: note = synthetic [barcode part2]
  source 1..12: mol_type = other DNA
ctagtgcgatta

SEQ ID NO: 47548 - DNA, 12 bp, synthetic construct
  misc_feature 1..12: note = synthetic [barcode part2]
  source 1..12: mol_type = other DNA
atagtcgttgac

SEQ ID NO: 47549 - DNA, 12 bp, synthetic construct
  misc_feature 1..12: note = synthetic [barcode part2]
  source 1..12: mol_type = other DNA
acgcgacaactc

SEQ ID NO: 47550 - DNA, 12 bp, synthetic construct
  misc_feature 1..12: note = synthetic [barcode part2]
  source 1..12: mol_type = other DNA
aacatgtccgat

SEQ ID NO: 47551 - DNA, 12 bp, synthetic construct
  misc_feature 1..12: note = synthetic [barcode part2]
  source 1..12: mol_type = other DNA
aatccgatgcgc

SEQ ID NO: 47552 - DNA, 12 bp, synthetic construct
  misc_feature 1..12: note = synthetic [barcode part2]
  source 1..12: mol_type = other DNA
acatagtccgat

SEQ ID NO: 47553 - DNA, 12 bp, synthetic construct
  misc_feature 1..12: note = synthetic [barcode part2]
  source 1..12: mol_type = other DNA
atcgccagtata

SEQ ID NO: 47554 - DNA, 12 bp, synthetic construct
  misc_feature 1..12: note = synthetic [barcode part2]
  source 1..12: mol_type = other DNA
catcgcactcta

SEQ ID NO: 47555 - DNA, 12 bp, synthetic construct
  misc_feature 1..12: note = synthetic [barcode part2]
  source 1..12: mol_type = other DNA
actcacgcgaca

SEQ ID NO: 47556 - DNA, 12 bp, synthetic construct
  misc_feature 1..12: note = synthetic [barcode part2]
  source 1..12: mol_type = other DNA
cgaatgtattgc

SEQ ID NO: 47557 - DNA, 12 bp, synthetic construct
  misc_feature 1..12: note = synthetic [barcode part2]
  source 1..12: mol_type = other DNA
cgagtgccaatc

SEQ ID NO: 47558 - DNA, 12 bp, synthetic construct
  misc_feature 1..12: note = synthetic [barcode part2]
  source 1..12: mol_type = other DNA
cgtccgatagtg

SEQ ID NO: 47559 - DNA, 12 bp, synthetic construct
  misc_feature 1..12: note = synthetic [barcode part2]
  source 1..12: mol_type = other DNA
cgttctcgtatg

SEQ ID NO: 47560 - DNA, 12 bp, synthetic construct
  misc_feature 1..12: note = synthetic [barcode part2]
  source 1..12: mol_type = other DNA
cacgattcgacg

SEQ ID NO: 47561 - DNA, 12 bp, synthetic construct
  misc_feature 1..12: note = synthetic [barcode part2]
  source 1..12: mol_type = other DNA
cggcaatcgcat

SEQ ID NO: 47562-47605 - skipped (44 entries)

SEQ ID NO: 47606 - DNA, 21 bp, synthetic construct
  misc_feature 1..21: note = synthetic [well-barcode]
  source 1..21: mol_type = other DNA
tagagtcatctgactgatcat

SEQ ID NO: 47607 - DNA, 21 bp, synthetic construct
  misc_feature 1..21: note = synthetic [well-barcode]
  source 1..21: mol_type = other DNA
atcacactacagctacgtgct

SEQ ID NO: 47608 - DNA, 21 bp, synthetic construct
  misc_feature 1..21: note = synthetic [well-barcode]
  source 1..21: mol_type = other DNA
tatagctacgtgatctagcgt

SEQ ID NO: 47609 - DNA, 21 bp, synthetic construct
  misc_feature 1..21: note = synthetic [well-barcode]
  source 1..21: mol_type = other DNA
atcgctgtgatagcagtacat

SEQ ID NO: 47610 - DNA, 21 bp, synthetic construct
  misc_feature 1..21: note = synthetic [well-barcode]
  source 1..21: mol_type = other DNA
acgactgacactgtgtcatat

SEQ ID NO: 47611 - DNA, 21 bp, synthetic construct
  misc_feature 1..21: note = synthetic [well-barcode]
  source 1..21: mol_type = other DNA
acgcactgctatcgcatcagt

SEQ ID NO: 47612 - DNA, 21 bp, synthetic construct
  misc_feature 1..21: note = synthetic [well-barcode]
  source 1..21: mol_type = other DNA
tacacgactagctagctgatc

SEQ ID NO: 47613 - DNA, 21 bp, synthetic construct
  misc_feature 1..21: note = synthetic [well-barcode]
  source 1..21: mol_type = other DNA
agcatagtactgcacgtctat

SEQ ID NO: 47614 - DNA, 21 bp, synthetic construct
  misc_feature 1..21: note = synthetic [well-barcode]
  source 1..21: mol_type = other DNA
tacactgtgtcagcacgagct

SEQ ID NO: 47615 - DNA, 21 bp, synthetic construct
  misc_feature 1..21: note = synthetic [well-barcode]
  source 1..21: mol_type = other DNA
tatcacacgtagtgacatctc

SEQ ID NO: 47616 - DNA, 21 bp, synthetic construct
  misc_feature 1..21: note = synthetic [well-barcode]
  source 1..21: mol_type = other DNA
acatacacgtgactcatagtc

SEQ ID NO: 47617 - DNA, 21 bp, synthetic construct
  misc_feature 1..21: note = synthetic [well-barcode]
  source 1..21: mol_type = other DNA
agacgtgatacgacagcactc

SEQ ID NO: 47618 - DNA, 21 bp, synthetic construct
  misc_feature 1..21: note = synthetic [well-barcode]
  source 1..21: mol_type = other DNA
atcagatagtacgcactacat

SEQ ID NO: 47619 - DNA, 21 bp, synthetic construct
  misc_feature 1..21: note = synthetic [well-barcode]
  source 1..21: mol_type = other DNA
tagcatcagatcgctcatact

SEQ ID NO: 47620 - DNA, 21 bp, synthetic construct
  misc_feature 1..21: note = synthetic [well-barcode]
  source 1..21: mol_type = other DNA
actagatcatcactgagacgt

SEQ ID NO: 47621 - DNA, 21 bp, synthetic construct
  misc_feature 1..21: note = synthetic [well-barcode]
  source 1..21: mol_type = other DNA
agtcacagctcacgatcacat

SEQ ID NO: 47622 - DNA, 21 bp, synthetic construct
  misc_feature 1..21: note = synthetic [well-barcode]
  source 1..21: mol_type = other DNA
acgagtgtacgtactgtgcgt

SEQ ID NO: 47623 - DNA, 21 bp, synthetic construct
  misc_feature 1..21: note = synthetic [well-barcode]
  source 1..21: mol_type = other DNA
tagtctgtcatcacgacatat

SEQ ID NO: 47624 - DNA, 21 bp, synthetic construct
  misc_feature 1..21: note = synthetic [well-barcode]
  source 1..21: mol_type = other DNA
acgatctgtatcgatctactc

SEQ ID NO: 47625 - DNA, 21 bp, synthetic construct
  misc_feature 1..21: note = synthetic [well-barcode]
  source 1..21: mol_type = other DNA
tactgatcgatctgtctgagt

SEQ ID NO: 47626 - DNA, 21 bp, synthetic construct
  misc_feature 1..21: note = synthetic [well-barcode]
  source 1..21: mol_type = other DNA
agctcatcacgcagtacacgt

SEQ ID NO: 47627 - DNA, 21 bp, synthetic construct
  misc_feature 1..21: note = synthetic [well-barcode]
  source 1..21: mol_type = other DNA
actacgcactgctacgcactc

SEQ ID NO: 47628 - DNA, 21 bp, synthetic construct
  misc_feature 1..21: note = synthetic [well-barcode]
  source 1..21: mol_type = other DNA
actgtacgtcgagagctgatc

SEQ ID NO: 47629 - DNA, 21 bp, synthetic construct
  misc_feature 1..21: note = synthetic [well-barcode]
  source 1..21: mol_type = other DNA
atagtcgactagctgtcgcat

SEQ ID NO: 47630 - DNA, 21 bp, synthetic construct
  misc_feature 1..21: note = synthetic [well-barcode]
  source 1..21: mol_type = other DNA
acgatcgcacatcacacacgt

SEQ ID NO: 47631 - DNA, 21 bp, synthetic construct
  misc_feature 1..21: note = synthetic [well-barcode]
  source 1..21: mol_type = other DNA
tatacgtcgatcatacgtgtc

SEQ ID NO: 47632 - DNA, 21 bp, synthetic construct
  misc_feature 1..21: note = synthetic [well-barcode]
  source 1..21: mol_type = other DNA
tatagactgcactagctagct

SEQ ID NO: 47633 - DNA, 21 bp, synthetic construct
  misc_feature 1..21: note = synthetic [well-barcode]
  source 1..21: mol_type = other DNA
agcagatacgcacactcgcat

SEQ ID NO: 47634 - DNA, 21 bp, synthetic construct
  misc_feature 1..21: note = synthetic [well-barcode]
  source 1..21: mol_type = other DNA
atctcgctgtctgacagacat

SEQ ID NO: 47635 - DNA, 21 bp, synthetic construct
  misc_feature 1..21: note = synthetic [well-barcode]
  source 1..21: mol_type = other DNA
acatcatcgctagagcagatc

SEQ ID NO: 47636 - DNA, 21 bp, synthetic construct
  misc_feature 1..21: note = synthetic [well-barcode]
  source 1..21: mol_type = other DNA
agactgagtacacgtacgagt

SEQ ID NO: 47637 - DNA, 21 bp, synthetic construct
  misc_feature 1..21: note = synthetic [well-barcode]
  source 1..21: mol_type = other DNA
atcatagtgtctgtgtagagt

SEQ ID NO: 47638 - DNA, 21 bp, synthetic construct
  misc_feature 1..21: note = synthetic [well-barcode]
  source 1..21: mol_type = other DNA
tatagcgtgtcgcagatagtc

SEQ ID NO: 47639 - DNA, 21 bp, synthetic construct
  misc_feature 1..21: note = synthetic [well-barcode]
  source 1..21: mol_type = other DNA
acgcagtgtgtagtacgtact

SEQ ID NO: 47640 - DNA, 21 bp, synthetic construct
  misc_feature 1..21: note = synthetic [well-barcode]
  source 1..21: mol_type = other DNA
acgtacatagacgagtgagat

SEQ ID NO: 47641 - DNA, 21 bp, synthetic construct
  misc_feature 1..21: note = synthetic [well-barcode]
  source 1..21: mol_type = other DNA
acgtgatcagagactgtagtc

SEQ ID NO: 47642 - DNA, 21 bp, synthetic construct
  misc_feature 1..21: note = synthetic [well-barcode]
  source 1..21: mol_type = other DNA
agatacatacatagcgagtgt

SEQ ID NO: 47643 - DNA, 21 bp, synthetic construct
  misc_feature 1..21: note = synthetic [well-barcode]
  source 1..21: mol_type = other DNA
tagtgacgactcgacgatctc

SEQ ID NO: 47644 - DNA, 21 bp, synthetic construct
  misc_feature 1..21: note = synthetic [well-barcode]
  source 1..21: mol_type = other DNA
acatcatcagcgagcgtgtgt

SEQ ID NO: 47645 - DNA, 21 bp, synthetic construct
  misc_feature 1..21: note = synthetic [well-barcode]
  source 1..21: mol_type = other DNA
agatagctagctagagtgtct

SEQ ID NO: 47646 - DNA, 21 bp, synthetic construct
  misc_feature 1..21: note = synthetic [well-barcode]
  source 1..21: mol_type = other DNA
acgtgtcagtgagagatacat

SEQ ID NO: 47647 - DNA, 21 bp, synthetic construct
  misc_feature 1..21: note = synthetic [well-barcode]
  source 1..21: mol_type = other DNA
tatcgactgtagagacacagt

SEQ ID NO: 47648 - DNA, 21 bp, synthetic construct
  misc_feature 1..21: note = synthetic [well-barcode]
  source 1..21: mol_type = other DNA
agtcagcagcagcgtatcatc

SEQ ID NO: 47649 - DNA, 21 bp, synthetic construct
  misc_feature 1..21: note = synthetic [well-barcode]
  source 1..21: mol_type = other DNA
tagagcgtgtgacgtagctat

SEQ ID NO: 47650 - DNA, 21 bp, synthetic construct
  misc_feature 1..21: note = synthetic [well-barcode]
  source 1..21: mol_type = other DNA
agcgagtctgcgatctgtcat

SEQ ID NO: 47651 - DNA, 21 bp, synthetic construct
  misc_feature 1..21: note = synthetic [well-barcode]
  source 1..21: mol_type = other DNA
agtctacgagacacgagcgtc

SEQ ID NO: 47652 - DNA, 21 bp, synthetic construct
  misc_feature 1..21: note = synthetic [well-barcode]
  source 1..21: mol_type = other DNA
atcagtcgcacatagcactat

SEQ ID NO: 47653 - DNA, 21 bp, synthetic construct
  misc_feature 1..21: note = synthetic [well-barcode]
  source 1..21: mol_type = other DNA
acactatctagacgcagtact

SEQ ID NO: 47654 - DNA, 21 bp, synthetic construct
  misc_feature 1..21: note = synthetic [well-barcode]
  source 1..21: mol_type = other DNA
tatagcgacgctgagacgatc

SEQ ID NO: 47655 - DNA, 21 bp, synthetic construct
  misc_feature 1..21: note = synthetic [well-barcode]
  source 1..21: mol_type = other DNA
tagagacacgagcgatcacat

SEQ ID NO: 47656 - DNA, 21 bp, synthetic construct
  misc_feature 1..21: note = synthetic [well-barcode]
  source 1..21: mol_type = other DNA
atatctacgtatcagcagact

SEQ ID NO: 47657 - DNA, 21 bp, synthetic construct
  misc_feature 1..21: note = synthetic [well-barcode]
  source 1..21: mol_type = other DNA
agtacacgactcatcagctgt

SEQ ID NO: 47658 - DNA, 21 bp, synthetic construct
  misc_feature 1..21: note = synthetic [well-barcode]
  source 1..21: mol_type = other DNA
atctagtacgtgcgtacgtat

SEQ ID NO: 47659 - DNA, 21 bp, synthetic construct
  misc_feature 1..21: note = synthetic [well-barcode]
  source 1..21: mol_type = other DNA
tactgacgtgtctcagagctc

SEQ ID NO: 47660 - DNA, 21 bp, synthetic construct
  misc_feature 1..21: note = synthetic [well-barcode]
  source 1..21: mol_type = other DNA
agctatcatcacgtgtcatct

SEQ ID NO: 47661 - DNA, 21 bp, synthetic construct
  misc_feature 1..21: note = synthetic [well-barcode]
  source 1..21: mol_type = other DNA
agtgctcatacatctgcacgt

SEQ ID NO: 47662 - DNA, 21 bp, synthetic construct
  misc_feature 1..21: note = synthetic [well-barcode]
  source 1..21: mol_type = other DNA
tatctacgagtgtgatcgctc

SEQ ID NO: 47663 - DNA, 21 bp, synthetic construct
  misc_feature 1..21: note = synthetic [well-barcode]
  source 1..21: mol_type = other DNA
agtgtcagcacagcactgcat

SEQ ID NO: 47664 - DNA, 21 bp, synthetic construct
  misc_feature 1..21: note = synthetic [well-barcode]
  source 1..21: mol_type = other DNA
acgcactgactcacgagtgat

SEQ ID NO: 47665 - DNA, 21 bp, synthetic construct
  misc_feature 1..21: note = synthetic [well-barcode]
  source 1..21: mol_type = other DNA
atacgctcgcagatctacgat

SEQ ID NO: 47666 - DNA, 21 bp, synthetic construct
  misc_feature 1..21: note = synthetic [well-barcode]
  source 1..21: mol_type = other DNA
atcacgacgcagtagatagat

SEQ ID NO: 47667 - DNA, 21 bp, synthetic construct
  misc_feature 1..21: note = synthetic [well-barcode]
  source 1..21: mol_type = other DNA
tactgtcgactcacatacgat

SEQ ID NO: 47668 - DNA, 21 bp, synthetic construct
  misc_feature 1..21: note = synthetic [well-barcode]
  source 1..21: mol_type = other DNA
agagtacgtactgtagtgact

SEQ ID NO: 47669 - DNA, 21 bp, synthetic construct
  misc_feature 1..21: note = synthetic [well-barcode]
  source 1..21: mol_type = other DNA
agtgagctgcacacactagtc

SEQ ID NO: 47670 - DNA, 21 bp, synthetic construct
  misc_feature 1..21: note = synthetic [well-barcode]
  source 1..21: mol_type = other DNA
atagatacgcatagcgtacgt

SEQ ID NO: 47671 - DNA, 21 bp, synthetic construct
  misc_feature 1..21: note = synthetic [well-barcode]
  source 1..21: mol_type = other DNA
agactgctgtgagactacgtc

SEQ ID NO: 47672 - DNA, 21 bp, synthetic construct
  misc_feature 1..21: note = synthetic [well-barcode]
  source 1..21: mol_type = other DNA
atcacacagtcgacactgtct

SEQ ID NO: 47673 - DNA, 21 bp, synthetic construct
  misc_feature 1..21: note = synthetic [well-barcode]
  source 1..21: mol_type = other DNA
tacatactgcagcgtgatcat

SEQ ID NO: 47674 - DNA, 21 bp, synthetic construct
  misc_feature 1..21: note = synthetic [well-barcode]
  source 1..21: mol_type = other DNA
agatacgagtgcgactgctgt

SEQ ID NO: 47675 - DNA, 21 bp, synthetic construct
  misc_feature 1..21: note = synthetic [well-barcode]
  source 1..21: mol_type = other DNA
acagactcatactagcgtgat

SEQ ID NO: 47676 - DNA, 21 bp, synthetic construct
  misc_feature 1..21: note = synthetic [well-barcode]
  source 1..21: mol_type = other DNA
tacgcagagtgtcacagtatc

SEQ ID NO: 47677 - DNA, 21 bp, synthetic construct
  misc_feature 1..21: note = synthetic [well-barcode]
  source 1..21: mol_type = other DNA
tagtgcgagtacgcagtcatc

SEQ ID NO: 47678 - DNA, 21 bp, synthetic construct
  misc_feature 1..21: note = synthetic [well-barcode]
  source 1..21: mol_type = other DNA
actgtcactgcgacacagagt

SEQ ID NO: 47679 - DNA, 21 bp, synthetic construct
  misc_feature 1..21: note = synthetic [well-barcode]
  source 1..21: mol_type = other DNA
actactcatagctcgacatat

SEQ ID NO: 47680 - DNA, 21 bp, synthetic construct
  misc_feature 1..21: note = synthetic [well-barcode]
  source 1..21: mol_type = other DNA
agactcacagcagagcgtact

SEQ ID NO: 47681 - DNA, 21 bp, synthetic construct
  misc_feature 1..21: note = synthetic [well-barcode]
  source 1..21: mol_type = other DNA
agtctacgtgcgtctcagtgt

SEQ ID NO: 47682 - DNA, 21 bp, synthetic construct
  misc_feature 1..21: note = synthetic [well-barcode]
  source 1..21: mol_type = other DNA
agatcagagatcgctgcgtct

SEQ ID NO: 47683 - DNA, 21 bp, synthetic construct
  misc_feature 1..21: note = synthetic [well-barcode]
  source 1..21: mol_type = other DNA
tacgtcacgacgtcagacgat

SEQ ID NO: 47684 - DNA, 21 bp, synthetic construct
  misc_feature 1..21: note = synthetic [well-barcode]
  source 1..21: mol_type = other DNA
agacagcacactacacacatc

SEQ ID NO: 47685 - DNA, 21 bp, synthetic construct
  misc_feature 1..21: note = synthetic [well-barcode]
  source 1..21: mol_type = other DNA
tagcgtagacacacgtcgatc

SEQ ID NO: 47686 - DNA, 21 bp, synthetic construct
  misc_feature 1..21: note = synthetic [well-barcode]
  source 1..21: mol_type = other DNA
tagcagcagacacgtgcgtat

SEQ ID NO: 47687 - DNA, 21 bp, synthetic construct
  misc_feature 1..21: note = synthetic [well-barcode]
  source 1..21: mol_type = other DNA
tagtcgactgtactagagtgt

SEQ ID NO: 47688 - DNA, 21 bp, synthetic construct
  misc_feature 1..21: note = synthetic [well-barcode]
  source 1..21: mol_type = other DNA
atacatcagagtctgtagcat

SEQ ID NO: 47689 - DNA, 21 bp, synthetic construct
  misc_feature 1..21: note = synthetic [well-barcode]
  source 1..21: mol_type = other DNA
acagtctgagcagatacgtat

SEQ ID NO: 47690 - DNA, 21 bp, synthetic construct
  misc_feature 1..21: note = synthetic [well-barcode]
  source 1..21: mol_type = other DNA
tagagctgtctcatcagcgtc

SEQ ID NO: 47691 - DNA, 21 bp, synthetic construct
  misc_feature 1..21: note = synthetic [well-barcode]
  source 1..21: mol_type = other DNA
actatcatcgctcatcgcact

SEQ ID NO: 47692 - DNA, 21 bp, synthetic construct
  misc_feature 1..21: note = synthetic [well-barcode]
  source 1..21: mol_type = other DNA
atctacgacgctatcatacgt

SEQ ID NO: 47693 - DNA, 21 bp, synthetic construct
  misc_feature 1..21: note = synthetic [well-barcode]
  source 1..21: mol_type = other DNA
tacgcagctcactagtgagtc

SEQ ID NO: 47694 - DNA, 21 bp, synthetic construct
  misc_feature 1..21: note = synthetic [well-barcode]
  source 1..21: mol_type = other DNA
atacgctcatacgtagtgctc

SEQ ID NO: 47695 - DNA, 21 bp, synthetic construct
  misc_feature 1..21: note = synthetic [well-barcode]
  source 1..21: mol_type = other DNA
acatacgtacgcagtcgcatc

SEQ ID NO: 47696 - DNA, 21 bp, synthetic construct
  misc_feature 1..21: note = synthetic [well-barcode]
  source 1..21: mol_type = other DNA
tactgcgagagctacagacat

SEQ ID NO: 47697 - DNA, 21 bp, synthetic construct
  misc_feature 1..21: note = synthetic [well-barcode]
  source 1..21: mol_type = other DNA
acgctatcagactatcacgct

SEQ ID NO: 47698 - DNA, 21 bp, synthetic construct
  misc_feature 1..21: note = synthetic [well-barcode]
  source 1..21: mol_type = other DNA
atatcgctgagcacgactgct

SEQ ID NO: 47699 - DNA, 21 bp, synthetic construct
  misc_feature 1..21: note = synthetic [well-barcode]
  source 1..21: mol_type = other DNA
agctgcagagtcatcgcatct

SEQ ID NO: 47700 - DNA, 21 bp, synthetic construct
  misc_feature 1..21: note = synthetic [well-barcode]
  source 1..21: mol_type = other DNA
acacgagcgtgtgtacagagt

SEQ ID NO: 47701 - DNA, 21 bp, synthetic construct
  misc_feature 1..21: note = synthetic [well-barcode]
  source 1..21: mol_type = other DNA
actgtgtacatctcatcgagt

SEQ ID NO: 47702 - DNA, 21 bp, synthetic construct
  misc_feature 1..21: note = synthetic [well-barcode]
  source 1..21: mol_type = other DNA
atcatagagatacagcagtgt

SEQ ID NO: 47703 - DNA, 21 bp, synthetic construct
  misc_feature 1..21: note = synthetic [well-barcode]
  source 1..21: mol_type = other DNA
tatctgacatacgactgtctc

SEQ ID NO: 47704 - DNA, 21 bp, synthetic construct
  misc_feature 1..21: note = synthetic [well-barcode]
  source 1..21: mol_type = other DNA
agcgagtatcatagcacgact

SEQ ID NO: 47705 - DNA, 21 bp, synthetic construct
  misc_feature 1..21: note = synthetic [well-barcode]
  source 1..21: mol_type = other DNA
acagacgctcgctgagcatat

SEQ ID NO: 47706 - DNA, 21 bp, synthetic construct
  misc_feature 1..21: note = synthetic [well-barcode]
  source 1..21: mol_type = other DNA
agtgacagactgagcatacgt

SEQ ID NO: 47707 - DNA, 21 bp, synthetic construct
  misc_feature 1..21: note = synthetic [well-barcode]
  source 1..21: mol_type = other DNA
tacgatctgagacactgatat

SEQ ID NO: 47708 - DNA, 21 bp, synthetic construct
  misc_feature 1..21: note = synthetic [well-barcode]
  source 1..21: mol_type = other DNA
tactcactagactagacacgt

SEQ ID NO: 47709 - DNA, 21 bp, synthetic construct
  misc_feature 1..21: note = synthetic [well-barcode]
  source 1..21: mol_type = other DNA
atagcatagcacgtacatctc

SEQ ID NO: 47710 - DNA, 21 bp, synthetic construct
  misc_feature 1..21: note = synthetic [well-barcode]
  source 1..21: mol_type = other DNA
tacacgtcagtgcgacagatc

SEQ ID NO: 47711 - DNA, 21 bp, synthetic construct
  misc_feature 1..21: note = synthetic [well-barcode]
  source 1..21: mol_type = other DNA
tatacgagtgtgagagtgcat

SEQ ID NO: 47712 - DNA, 39 bp, synthetic construct
  misc_feature 1..39: note = synthetic [plate-barcode]
  source 1..39: mol_type = other DNA
atcagctacacgtgctgtcacgaccggtgctcgatttag

SEQ ID NO: 47713 - DNA, 39 bp, synthetic construct
  misc_feature 1..39: note = synthetic [plate-barcode]
  source 1..39: mol_type = other DNA
tcgcagagtgatcgatatcacgaccggtgctcgatttag

SEQ ID NO: 47714 - DNA, 39 bp, synthetic construct
  misc_feature 1..39: note = synthetic [plate-barcode]
  source 1..39: mol_type = other DNA
gatacgagagagtgcatacacgaccggtgctcgatttag

SEQ ID NO: 47715 - DNA, 39 bp, synthetic construct
  misc_feature 1..39: note = synthetic [plate-barcode]
  source 1..39: mol_type = other DNA
tctcgcactagacatctacacgaccggtgctcgatttag

SEQ ID NO: 47716 - DNA, 39 bp, synthetic construct
  misc_feature 1..39: note = synthetic [plate-barcode]
  source 1..39: mol_type = other DNA
gtgtgcgagtcacgcatacacgaccggtgctcgatttag

SEQ ID NO: 47717 - DNA, 39 bp, synthetic construct
  misc_feature 1..39: note = synthetic [plate-barcode]
  source 1..39: mol_type = other DNA
tctgagctgtctactcatcacgaccggtgctcgatttag

SEQ ID NO: 47718 - DNA, 39 bp, synthetic construct
  misc_feature 1..39: note = synthetic [plate-barcode]
  source 1..39: mol_type = other DNA
atacgctactcatacgctcacgaccggtgctcgatttag

SEQ ID NO: 47719 - DNA, 39 bp, synthetic construct
  misc_feature 1..39: note = synthetic [plate-barcode]
  source 1..39: mol_type = other DNA
agatcgctcagacgtagtcacgaccggtgctcgatttag
